(19) United States
(12) Patent Application Publication
(10) Pub. No.: US 2024/0376472 A1
(43) Pub. Date: Nov. 14, 2024

(54) Conditional Double Stranded Antisense Oligonucleotides

(71) Applicant: Emory University, Atlanta, GA (US)

(72) Inventors: Jiahui Zhang, Dedham, MA (US); Khalid Salaita, Atlanta, GA (US); Hanjoong Jo, Atlanta, GA (US)

(21) Appl. No.: 18/683,467

(22) PCT Filed: Aug. 17, 2022
(86) PCT No.: PCT/US2022/075049

§ 371 Date: Feb. 13, 2024

Related U.S. Application Data
(60) Provisional application No. 63/233,979, filed on Aug. 17, 2021.

(51) Int. Cl. C12N 15/113

(52) U.S. Cl. CPC C12N 15/113; C12N 2310/113; C12N 2310/315; C12N 2310/3231

(57) ABSTRACT

This disclosure relates to conditional double stranded antisense oligonucleotides and uses in managing diseases and conditions. In certain embodiments, the conditional double stranded antisense oligonucleotides are non-naturally occurring double stranded nucleobase polymer complexes comprising a first strand and a second strand, wherein the first strand is an antisense oligonucleotide connected to a segment that is partially identical to cell specific RNA, e.g., microRNA, and the second strand is a locking strand configured to release the first strand when in the presence of the cells specific RNA; thus, releasing the antisense oligonucleotide in a manner limited to cells that express a specific RNA.

### CROSS-REFERENCE TO RELATED APPLICATIONS

[0001] This application claims the benefit of U.S. Provisional Application No. 63/233,979 filed Aug. 17, 2021. The entirety of this application is hereby incorporated by reference for all purposes.

### STATEMENT REGARDING FEDERALLY SPONSORED RESEARCH OR DEVELOPMENT

[0002] This invention was made with government support under HL142866, HL095070, and HL139757 awarded by the National Institutes of Health. The government has certain rights in the invention.

### INCORPORATION-BY-REFERENCE OF MATERIAL SUBMITTED AS AN XML FILE VIA THE OFFICE ELECTRONIC FILING SYSTEM

[0003] The Sequence Listing associated with this application is provided in XML format and is hereby incorporated by reference into the specification. The name of the XML file containing the Sequence Listing is 21033PCT.xml. The XML file is 2310 KB, was created on Aug. 15, 2022, and is being submitted electronically via the USPTO patent electronic filing system.

### BACKGROUND

[0004] Antisense oligonucleotides (ASOs) are promising therapeutics being developed to treat diseases. ASOs were historically designed as single stranded nucleobase polymers to hybridize to a mRNA target, thereby reducing protein expression, e.g., by recruiting RNase H to cleave the mRNA. However, single stranded ASOs may induce unwanted side effects in nontargeted tissues or cells. Thus, there is a need to identify improved methods for targeted delivery of ASOs.
[0005] Greenberger et al. report an RNA antagonist of hypoxia-inducible factor-1α, EZN-2968, inhibits tumor cell growth. Molecular Cancer Therapeutics, 2008, 7(11):3598-3608.
[0006] Lewis et al. report regulation and biological function of the liver-specific miR-122. Biochem. Soc. Trans, 2010, 38, 1553-1557.
[0007] Zhang et al. report dynamic DNA nanotechnology using strand-displacement reactions. Nature Chemistry, 2011, 3(2):103.
[0008] Prakash et al. report targeted delivery of antisense oligonucleotides to hepatocytes using triantennary N-acetyl galactosamine. Nucleic acids research, 2014, 42(13):8796-8807.
[0009] Hanna et al. report the potential for microRNAs in clinical research. Frontiers in Genetics, 2019, 10, 478.
[0010] Esmerats et al., report disturbed flow increases UBE2C (Ubiquitin E2 Ligase C) via loss of miR-483-3p, inducing aortic valve calcification by the pVHL (von Hippel-Lindau protein) and HIF-1α (Hypoxia-Inducible Factor-la) pathway in endothelial cells. Arteriosclerosis, Thrombosis, and Vascular Biology, 2019, 39(3):467-481.

[0011] References cited herein are not an admission of prior art.

### SUMMARY

[0012] This disclosure relates to conditional double stranded antisense oligonucleotides and uses in managing diseases and conditions. In certain embodiments, the conditional double stranded antisense oligonucleotides are non-naturally occurring double stranded nucleobase polymer complexes comprising a first strand and a second strand, wherein the first strand is an antisense oligonucleotide connected to a segment that is partially identical to cell specific RNA, e.g., microRNA, and the second strand is a locking strand configured to release the first strand when in the presence of the cells specific RNA; thus, releasing the antisense oligonucleotide to alter the expression or degradation of a nucleic acid targeted by the antisense oligonucleotide in a manner limited to cells that express a specific RNA. In certain embodiments, the second strand contains a single stranded toehold segment that is designed to bind to the cell specific RNA facilitating the release of the first strand.

[0013] In certain embodiments, the conditional double stranded antisense oligonucleotides are non-naturally occurring double stranded nucleobase polymer complexes comprising a first strand comprising, a first domain with a first segment of a cell specific RNA and a second domain that is complementary to a segment of target RNA; and a second strand comprising, a first domain that is complementary to the second domain of the first strand, a second domain that is complementary to the first domain of the first strand, and a third domain that is complementary to a second segment of the cell specific RNA, wherein the third domain is not complementary to the first strand providing a single stranded toehold segment.

[0014] In certain embodiments, between the first domain of the first strand and the second domain of the first strand is one or more nucleobases that do not base pair with the second strand providing a bulge.

[0015] In certain embodiments, the cell specific RNA is microRNA. In certain embodiments, the cell specific RNA is hepatocyte-specific miRNA, miR-122. In certain embodiments, the target RNA is messenger RNA. In certain embodiments, the target RNA is HIF1alpha messenger RNA.

[0016] In certain embodiments, this disclosure contemplates a conditional double stranded antisense oligonucleotide disclosed herein comprising or conjugated to a label.

[0017] In certain embodiments, this disclosure contemplates a particle comprising a conditional double stranded antisense oligonucleotide disclosed herein.

[0018] In certain embodiments, this disclosure contemplates a pharmaceutical composition comprising conditional double stranded antisense oligonucleotide or particle comprising the same as disclosed herein and a pharmaceutically acceptable excipient.

[0019] In certain embodiments, this disclosure relates to methods of treating a disease or condition associated with target nucleic acid/RNA overexpression in a cell characterized by cell specific nucleic acid/RNA expression comprising administering to a subject in need thereof an effective amount of a double stranded nucleobase polymer complex or particle thereof as disclosed herein.

[0020] In certain embodiments, this disclosure relates to the production of a medicament for use in treating a disease or condition associated with target nucleic acid/RNA overexpression in a cell characterized by cell specific nucleic acid/RNA expression as disclosed herein.

### BRIEF DESCRIPTION OF THE SEVERAL VIEWS OF THE DRAWINGS

[0021] FIG. 1 illustrates a scheme showing the design and the triggering mechanism of conditional antisense oligonucleotides (ASOs). In this example, the conditional ASOs are formed by annealing a cell specific partial miRNA sequence and antisense oligonucleotide, i.e., pM-ASO strand and a locking strand. The pM-ASO strand is the parental ASO extended with partial miRNA sequence at its 5′ terminus. The locking stand comprises an anti-miRNA sequence and complementary sequence of the ASO. The mRNA targeting ASO sequence in the conditional ASO is sequestered, which abolishes its binding capability to the target mRNA in the absence of the trigger miRNA. The duplex can dissociate in the presence of trigger miRNA, exposing the mRNA targeting ASO sequence and causing the down regulation of the target mRNA. The triggered activation of conditional ASO is driven by toehold-mediated strand displacement. miRNA binds to the toehold region on the conditional ASO, which initiates branch migration and eventually leads to the dissociation of the pM-ASO strand and the locking strand. The activated pM-ASO strand can then bind to the target mRNA and cause its degradation.

[0022] FIG. 2A shows the design of conditional EZN2968 with end destabilization and bulge destabilization. For end destabilization, 3-7 nt on the 5′ termini of the locking strand were removed. For bulge destabilization, 3-7 nt in the middle of the locking strand were removed.

[0023] FIG. 2B shows a schematic description of in buffer assay to measure leakage activation triggered by a HIF1α mRNA mimicking sequence.

[0024] FIG. 2C shows a schematic description of miR-122 triggered activation of the conditional EZN2968. Cy5 and quencher were labeled on the conditional EZN2968 and the locking strand separately. The annealed duplex was incubated with a HIF1α mRNA mimicking sequence (mRNA mimic) or a miR-122 mimicking sequence (mRNA mimic).

[0025] FIG. 2D shows the fluorescence increases due to dequenching caused by displacement which was quantified with plate reader to calculate the percentage displacement. 10 nM unmodified conditional EZN2968 duplex was incubated with 100 nM HIF1α mRNA mimic at 37° C. for 2 h, and fluorescence intensity of Cy5 was measured to determine the percentage of displaced and activated pM-EZN strands. 10 nM unmodified conditional EZN2968 duplex was incubated with 100 nM miRNA mimic at 37° C. for 2 h, and fluorescence intensity of Cy5 was measured to determine the percentage of displaced and activated pM-EZN strands. Ratios of miR-122 triggered displacement and mRNA triggered displacement were determined.

[0026] FIG. 3A illustrates the structure and chemistry of conditional EZN2968. A conditional EZN2968 is composed of a pM-EZN strand and a locking strand. By tuning the length of the two strands, the duplexes with different toehold lengths and bulge sizes were created.

[0027] FIG. 3B shows data when HeLa cells were transfected with 10 nM of each duplex and incubated for 24 h. HIF1α mRNA levels were quantified by qPCR normalized to 18 s.

[0028] FIG. 3C shows data where LN229-V6R-Luc cells were transfected with 10 nM of each duplex and incubated for 4 h. 20 μM IOX4 was added in each well and incubated for another 20 h before luciferase assay was conducted to assess HIF1α activity.

[0029] FIG. 3D shows mean fluorescence intensity when HeLa cells were transfected with 10 nM Cy5-quencher labeled duplexes and incubated for 24 h, quantified by flow cytometry.

[0030] FIG. 4A shows data where U373 cells were co-transfected with 10 nM T10B0*, T7B0* or T7B3* and 500 nM miR-122 mimic. After 24 h incubation, HIF1α mRNA levels were quantified by qPCR normalized to 18 s.

[0031] FIG. 4B shows a western blot where U373 cells were cotransfected with 10 nM T7B3* and 500 nM miR-122 mimic and incubated for 24 h incubation. The cells were then lysed.

[0032] FIG. 4C shows data where HIF1α protein was quantified from the western blot.

[0033] FIG. 4D shows data where cells were co-transfected with 10 nM T7B3* and different concentrations of miR-122 mimic. After 24 h incubation, HIF1α mRNA levels were quantified by qPCR normalized to 18 s.

[0034] FIG. 4E shows data where U373 cells were co-transfected with 10 nM T7B3* with toehold or without toehold and 500 nM miR-122 mimic. After 24 h incubation, HIF1α mRNA levels were quantified by qPCR normalized to 18 s.

[0035] FIG. 4F shows data where U373 cells were co-transfected with 10 nM T7B3* and 100 nM miR-122 mimic or scr. 1-7nt miR-122. After 24 h incubation, HIF1α mRNA levels were quantified by qPCR normalized to 18 s.

[0036] FIG. 5A shows a scheme of fluorescence dequenching and fluorescence lifetime increase of Cy5 due to activation of T7B3* by miR-122 mimic.

[0037] FIG. 5B shows data on mean fluorescence intensity of U373 cells cotransfected with 10 nM T7B3* and 500 nM miR-122, scr. miR-122 and scr. 1-7nt miR-122 and incubated for 24 h.

[0038] FIG. 5C shows data of amplitude-averaged fluorescence lifetime of U373 cells transfected with 10 nM Cy5-Q-labeled T7B3* and 500 nM miR-122, scr. miR-122, or scr. 1-7nt miR-122, and incubated for 24 h. Cy5-labeled pM15-EZN or Cy5-labeled T7B3* transfected cells are positive controls, and Cy5-Q-labeled T7B3* transfected cells are negative controls.

[0039] FIG. 5D shows data of intensity-averaged fluorescence lifetime.

[0040] FIG. 6A shows data when Huh7 liver cells were transfected with 50 nM T7B3* with toehold or without toehold using Oligofectamine™. After 24 h incubation, HIF1α mRNA levels were quantified by qPCR normalized to 18 s.

[0041] FIG. 6B shows data when Huh7 cells were co-transfected with 50 nM T7B3* and 500 nM locking strand B3*. After 24 h incubation, HIF1α mRNA levels were quantified by qPCR normalized to 18 s.

[0042] FIG. 6C shows data when Huh7 cells were transfected with different concentrations of anti-miR-122 and 50 nM T7B3* sequentially with a 6 h interval. 24 h after the second transfection, HIF1α mRNA levels were quantified by qPCR normalized to 18 s.

[0043] FIG. 6D shows data when U373 cells were transfected with 10 nM miR-122- or miR-21-inducible T7B3* for 24 h. Corresponding pM15-EZN strands were transfected as positive controls. HIF1α mRNA levels were quantified by qPCR and normalized to 18 s.

[0044] FIG. 7 illustrates a conditional double stranded antisense oligonucleotide which is a non-naturally occurring double stranded nucleobase polymer complex (top). A first strand (1, partial miRNA/pM-ASO strand) comprises, a first domain (2, partial miRNA) with a nucleotide sequence identical to a first segment (10) of cell specific RNA, (8), e.g. miRNA, and a second domain (3, ASO) that is complementary to a segment of target RNA, e.g. mRNA; and a second strand (4, locking Strand) comprising, a first domain (5, comp-ASO) that is complementary to the second domain (3) of the first strand, a second domain (6, anti-partial miRNA) that is complementary the first domain (2) of the first strand, and a third domain (7, anti-miRNA) that is complementary to a second segment (9) of the cell specific RNA (8), wherein the third domain is not complementary to the first strand (1) providing single stranded segment (7, toehold). The first domain (2) of the first strand (1) is on the 5′ end of the first strand (1). The second domain (3) of the first strand (1) is on the 3′ end of the first strand (1). The first domain (5) of the second strand (4) is on the 5′ end of the second strand (4). The second domain (6) of the second strand (4) is on the 3′ end of the first domain (5) of the second strand (4). The third domain (7) of the second strand (4) is on the 3′-end of the second strand (4). The first segment (10) of cell specific RNA (8) is on the 3′ end. The second segment (9) of the cell specific RNA (8) is on the 5′ end.

### DETAILED DESCRIPTION

[0045] Before the present disclosure is described in greater detail, it is to be understood that this disclosure is not limited to particular embodiments described, and as such may, of course, vary. It is also to be understood that the terminology used herein is for the purpose of describing particular embodiments only, and is not intended to be limiting, since the scope of the present disclosure will be limited only by the appended claims.

[0046] Unless defined otherwise, all technical and scientific terms used herein have the same meaning as commonly understood by one of ordinary skill in the art to which this disclosure belongs. Although any methods and materials similar or equivalent to those described herein can also be used in the practice or testing of the present disclosure, the preferred methods and materials are now described.

[0047] All publications and patents cited in this specification are herein incorporated by reference as if each individual publication or patent were specifically and individually indicated to be incorporated by reference and are incorporated herein by reference to disclose and describe the methods and/or materials in connection with which the publications are cited.

[0048] As will be apparent to those of skill in the art upon reading this disclosure, each of the individual embodiments described and illustrated herein has discrete components and features which may be readily separated from or combined with the features of any of the other several embodiments without departing from the scope or spirit of the present disclosure. Any recited method can be carried out in the order of events recited or in any other order that is logically possible.

[0049] Embodiments of the present disclosure will employ, unless otherwise indicated, techniques of medicine, organic chemistry, biochemistry, molecular biology, pharmacology, and the like, which are within the skill of the art. Such techniques are explained fully in the literature.

[0050] The term “embodiment” refers to an example and does not infer that an invention is necessary limited to such example.

[0051] It must be noted that, as used in the specification and the appended claims, the singular forms “a,” “an,” and “the” include plural referents unless the context clearly dictates otherwise. In this specification and in the claims that follow reference will be made to a number of terms that shall be defined to have the following meanings unless a contrary intention is apparent.

[0052] As used in this disclosure and claim(s), the words “comprising” (and any form of comprising, such as “comprise” and “comprises”), “including” (and any form of including, such as “includes” and “include”) or “containing” (and any form of containing, such as “contains” and “contain”) have the meaning ascribed to them in U.S. Patent law in that they are inclusive or open-ended and do not exclude additional, unrecited elements or method steps.

[0053] “Consisting essentially of” or “consists of” or the like, when applied to methods and compositions encompassed by the present disclosure refers to compositions like those disclosed herein that exclude certain prior art elements to provide an inventive feature of a claim, but which may contain additional composition components or method steps, etc., that do not materially affect the basic and novel characteristic(s) of the compositions or methods.

[0054] The term “comprising” in reference to a nucleic acid having a nucleotide sequence refers a nucleotide that may contain additional 5′-end or 3′-end nucleotides, i.e., the term is intended to include the nucleic acid sequence within a larger sequence. The term “consisting of” in reference to a nucleic acid having a nucleotide sequence refers a nucleic acid having the exact number of nucleotides in the sequence and not more or having not more than a rage of nucleotides expressly specified in the claim. In certain embodiments, the disclosure contemplates that the “5′-end” of a nucleic acid may consist of a nucleotide sequence,” which refers to the 5′-end of the nucleic acid having the exact number of nucleotides in the sequence and not more or having not more than a rage of nucleotides specified in the claim; however, the 3′-end may be connected to additional nucleotides, e.g., as part of a larger nucleic acid. In certain embodiments, the disclosure contemplates that the “3′-end” of a nucleic acid may consist of a nucleotide sequence,” which refers to the 3′-end of the nucleic acid having the exact number of nucleotides in the sequence and not more or having not more than a rage of nucleotides specified in the claim; however, the 5′-end may be connected to additional nucleotides, e.g., as part of a larger nucleic acid.

[0055] The term “inserting” into a cell refers to the process of introducing nucleobase polymers, nucleic acids, DNA, or RNA into the cytosol/cytoplasm of cells e.g., eukaryotic somatic cells, bypassing the cellular membrane. Phosphate backbones of DNA and RNA are negatively charged molecules and cell membranes are negatively charged. Thus, nucleic acids typically do not spontaneously pass-through cellular membranes. A variety of techniques are known in the art to move extracellular nucleic acid inside cells. Inserting nucleic acids into cells can be accomplished by mechanical means, e.g., microneedles/microinjection, electroporation, chemical, or biomolecular means, e.g., surrounding the nucleic acid in recombinant viral particles that release the interior components after cellular fusion and entry.

[0056] Cellular “transfection” refers to is the process of introducing nucleic acids into cells by chemical mechanism that interact with bilayer membranes. For example, calcium phosphate and diethylaminoethyl (DEAE)-dextran and cationic lipid-based reagents are able to coat nucleic acids, enabling the complexes of DNA:transfection reagents to cross cell membranes These complexes may be integrated into lipids formations/artificial liposomes. Cationic lipids are typically mixed with neutral lipids such as L-dioleoyl phosphatidylethanolamine to enhance fusion with lipid bilayers.

[0057] The term “specific binding agent” refers to a molecule, such as a protein, antibody, or nucleic acid, that binds a target molecule with a greater affinity than other random molecules, proteins, or nucleic acids. Examples of specific binding agents include antibodies that bind an epitope of an antigen or a receptor which binds a ligand. “Specifically binds” refers to the ability of a specific binding agent (such as an ligand, receptor, enzyme, nucleic acid, antibody or binding region/fragment thereof) to recognize and bind a target molecule such that its affinity (as determined by, e.g., affinity ELISA or other assays) is at least 10 times as great, but optionally 50 times as great, 100, 250 or 500 times as great, or even at least 1000 times as great or more as the affinity of the same for any other random molecule, nucleic acid, or polypeptide.

[0058] As used herein, the term “conjugated” refers to linking molecular entities through covalent bonds, or by other specific binding interactions, such as due to hydrogen bonding and other van der Walls forces. The force to break a covalent bond is high, e.g., about 1500 pN for a carbon-to-carbon bond. The force to break a combination of strong protein interactions is typically a magnitude less, e.g., biotin to streptavidin is about 150 pN. Thus, a skilled artisan would understand that conjugation must be strong enough to bind molecular entities in order to implement the intended results.

[0059] A “linking group” refers to any variety of covalent molecular arrangements that can be used to bridge to molecular moieties together. An example formula may be —Rₙ— wherein R is selected individually and independently at each occurrence as: —CRₙRₙ—, —CHRₙ—, —CH—, —C—, —CH₂—, —C(OH)Rₙ, —C(OH)(OH)—, —C(OH)H, —C(Hal)Rₙ—, —C(Hal)(Hal)-, —C(Hal)H—, —C(N₃)Rₙ—, —C(CN)Rₙ—, —C(CN)(CN)—, —C(CN)H—, —C(N₃)(N₃)—, —C(N₃)H—, —O—, —S—, —N—, —NH—, —NRn—, (C═O)—, —(C═NH)—, —(C═S)—, —(C═CH₂)—, which may contain single, double, or triple bonds individually and independently between the R groups. If an R is branched with an Rₙ it may be terminated with a group such as —CH₃, —H, —CH═CH₂, —CCH, —OH, —SH, —NH₂, —N₃, —CN, or -Hal, or two branched Rs may form an aromatic or non-aromatic cyclic structure. It is contemplated that in certain instances, the total Rs or “n” may be less than 100 or 50 or 25 or 10. Examples of linking groups include bridging alkyl groups and alkoxyalkyl groups.

[0060] A “label” refers to a detectable compound or composition that is conjugated directly or indirectly to another molecule, such as an antibody or a protein, to facilitate detection of that molecule. Specific, non-limiting examples of labels include fluorescent tags, enzymatic linkages, and radioactive isotopes. In one example, a peptide “label” refers to incorporation of a heterologous polypeptide in the peptide, wherein the heterologous sequence can be identified by a specific binding agent, antibody, or bind to a metal such as nickel/nitrilotriacetic acid, e.g., a poly-histidine sequence. Specific binding agents and metals can be conjugated to solid surfaces to facilitate purification methods. A label includes the incorporation of a radiolabeled amino acid or the covalent attachment of biotinyl moieties to a polypeptide that can be detected by marked avidin (for example, streptavidin containing a fluorescent marker or enzymatic activity that can be detected by optical or colorimetric methods). Various methods of labeling polypeptides and glycoproteins are known in the art and may be used. Examples of labels for polypeptides include, but are not limited to, the following: radioisotopes or radionucleotides (such as ³⁵S or ¹³¹I) fluorescent labels (such as fluorescein isothiocyanate (FITC), rhodamine, lanthanide phosphors), enzymatic labels (such as horseradish peroxidase, beta-galactosidase, luciferase, alkaline phosphatase), chemiluminescent markers, biotinyl groups, predetermined polypeptide epitopes recognized by a secondary reporter (such as a leucine zipper pair sequences, binding sites for secondary antibodies, metal binding domains, epitope tags), or magnetic agents, such as gadolinium chelates. In some embodiments, labels may be attached by spacer arms of various lengths to reduce potential steric hindrance.

[0061] A “fluorescent tag” or “fluorescent dye” refers to a compound that can re-emit electromagnetic radiation upon excitation with electromagnetic radiation (e.g., ultraviolet light) of a different wavelength. Typically, the emitted light has a longer wavelength (e.g., in visible spectrum) than the absorbed radiation. As the emitted light typically occurs almost simultaneously, i.e., in less than one second, when the absorbed radiation is in the invisible ultraviolet region of the spectrum, the emitted light may be in the visible region resulting in a distinctive identifiable color signal. Small molecule fluorescent tags typically contain several combined aromatic groups, or planar or cyclic molecules with multiple interconnected double bonds. Chen et al. report a variety of fluorescent tags that can be viewed across the visible spectrum. Nature Biotechnology, 2019, 37, 1287-1293. The term “fluorescent tag” is intended to include compounds of larger molecular weight such as natural fluorescent proteins, e.g., green fluorescent protein (GFP) and phycobiliproteins (PE, APC), and fluorescence particles such as quantum dots, e.g., preferably having 2-10 nm diameter.

[0062] The term “nucleobase polymer” refers to a polymer comprising nitrogen containing aromatic or heterocyclic bases that bind to naturally occurring nucleic acids through hydrogen bonding otherwise known as base pairing. A typical nucleobase polymer is a nucleic acid, RNA, DNA, or chemically modified form thereof. A nucleobase polymer may contain DNA or RNA or a combination of DNA or RNA nucleotides or may be single or double stranded or both, e.g., they may contain overhangs, hairpins, bends, etc. Nucleobase polymers may contain naturally occurring or synthetically modified bases and backbones.

[0063] With regard to the nucleobases, it is contemplated that the term encompasses isobases, otherwise known as modified bases, e.g., are isoelectronic or have other substitutes configured to mimic naturally occurring hydrogen bonding base-pairs. Examples of nucleotides with modified adenosine or guanosine include, but are not limited to, hypoxanthine, xanthine, 7-methylguanine. Examples of nucleotides with modified cytidine, thymidine, or uridine include 5,6-dihydrouracil, 5-methylcytosine, 5-hydroxymethylcytosine. Contemplated isobases include 2′-deoxy-5-methylisocytidine (iC) and 2′-deoxy-isoguanosine (iG) (see U.S. Pat. Nos. 6,001,983; 6,037,120; 6,617,106; and 6,977,161). Within any of the sequences disclosed herein U may be substituted for T, or T may be substituted for U. U is one of the four nucleobases in the nucleic acid RNA. In DNA, the uracil (U) nucleobase is replaced by thymine (T). Uracil is a demethylated form of thymine. Thus, from a structural standpoint natural RNA is distinct from DNA due to the presence of a 2′ hydroxy on the ribose unit and demethylated thymine bases.

[0064] Nucleobase polymers may be chemically modified, e.g., within the sugar backbone or on the 5′ or 3′ ends. The nucleobase polymers can be modified, for example, with 2′-amino, 2′-O-allyl, 2′-fluoro, 2′-O-methyl, 2′-methyl, 2′-H of the ribose ring, or a locked nucleic acid. Locked nucleic acid (LNA) refers to oligonucleotides that contain one or more nucleobases in which an extra methylene bridge fixes the confirmation sugar moiety, e.g., in the C3′-endo (beta-D-LNA) or C2′-endo (alpha-L-LNA) conformation of ribose. Using locked nucleic acids within a nucleobase polymer typically increases the specific binding between a double stranded complex. In certain embodiments, the nucleobase polymer comprises locked monomers of 1-(hydroxymethyl)-2,5-dioxabicyclo[2.2.1]heptan-7-ol. In certain embodiments, nucleobase polymers are contemplated to comprise phosphorodiamidate morpholino oligomers (PMO).

[0065] In certain embodiments, nucleobase polymers disclosed herein may contain monomers of phosphodiester, phosphorothioate, methylphosphonate, phosphorodiamidate, piperazine phosphorodiamidate, ribose, 2′-O-methy ribose, 2′-O-methoxyethyl ribose, 2′-methyl ribose, 2′-fluororibose, deoxyribose, 1-(hydroxymethyl)-2,5-dioxabicyclo[2.2.1]heptan-7-ol, P-(2-(hydroxymethyl)morpholino)-N,N-dimethylphosphonamidate, morpholin-2-ylmethanol, (2-(hydroxymethyl)morpholino)(piperazin-1-yl)phosphinate, or peptide nucleic acids or combinations thereof.

Conditional Antisense Oligonucleotide Triggered by miRNA

[0066] Antisense oligonucleotides (ASOs) are an emerging class of promising therapeutics which function by down regulating disease-related RNA. However, like all other oligonucleotide therapeutics, ASOs lack specificity to desired cell subtypes or tissues, which might induce unwanted effects in nontargeted tissues or cells. To provide finer control of ASO activity toward the goal of enhancing its specificity, a conditional ASO was designed that can be activated by a tissue/cell type specific transcript. The miR-122-inducible HIF1α ASO conditionally inhibits HIF1α in the presence of a hepatocyte-specific miRNA, miR-122, via toehold exchange reaction. The effect of conformation, thermostability, and chemical composition of the conditional ASO on its spontaneous activation and miR-122 triggered activation were evaluated. Knockdown of HIF1α expression by the conditional ASO upon triggering is demonstrated by both synthetic miR-122 mimic and endogenous miR-122 in vitro. The HIF1α knockdown mediated by the conditional ASO is due to separation and re-hybridization of the duplex, depending on toehold binding and miR-122 levels. The design principle of miRNA inducible ASO provides a method for developing other disease or tissue specific transcript inducible ASOs to enhance specificity and enhance controllability and safety of oligonucleotide therapeutics. Utilization of intracellular markers for controlling activity of ASOs expand the targeting competency to a broader range of clinical indications and provide better control over ASOs therapeutics.

[0067] To control oligonucleotide-mediated activity, a complementary sequence with high affinity against the oligonucleotide can be hybridized to it; thus, blocking its ability to bind the mRNA target, hence inhibiting its activity. ASO activity is inhibited via hybridization using a complementary sequence. De-hybridization of the duplex will rescue the ASO activity, which can be achieved via toehold-mediated displacement or exchange reaction triggered by an endogenous RNA transcript such as microRNAs (miRNAs). Expression of microRNAs change dynamically at different developmental and disease stages as well as in specific tissues and cell types. Here, miRNAs are contemplated as endogenous triggers to control ASO activity and enable mRNA knockdown in specific cell types or tissues.

[0068] Liver-specific microRNA (miR-122) triggers activation of a conditional HIF1α ASO reported herein. MicroRNA-122 is primarily expressed in hepatocytes and makes up to 70% and 52% of the total hepatic miRNA pool in adult mouse and human, respectively. HIF1α is a transcription factor that is related to diverse human diseases, such as cancer and cardiovascular diseases. However, because HIF1α is involved in a variety of cell activities and plays protective roles in wound healing and repairing acute injury as well as regulating neo-angiogenesis and tissue vascularization, systemically inhibiting of HIF1α may lead to side effects. Therefore, conditional regulation of HIF1α in targeted tissue or specific cell types could be beneficial.

[0069] A library of conditional ASOs were created and characterized. The library was tested to identify the design features that result in the most selective triggering of the ASO. The role of duplex architecture was investigated, including the length and spatial arrangement of single and double stranded domains, thermostability and chemical composition of the conditional ASO. Activation of the conditional ASOs were demonstrated by both a synthetic oligonucleotide mimicking miR-122 and endogenous miR-122 in vitro. The design principles of the conditional ASO discovered herein provide insights for the development of specific transcript inducible ASOs to enhance specificity of oligonucleotide therapeutics.

[0070] The main advantage of this design is the enhancement in specificity: allowing therapeutic oligonucleotides to exclusively down regulate gene expression transiently in a cell-type specific manner. Conditional ASO will be most desirable when target mRNAs are broadly expressed across many cell types but where selective inhibition would be desirable.

[0071] In addition to miRNAs, other cellular RNAs can be also used to trigger the conditional ASOs. Herein, miRNA was used as a trigger because of its expression is highly regulated in certain cell types and disease conditions, and because of its innate functions in binding to complementary nucleic acids. Conditional oligonucleotides can be delivered with other commonly used delivery methods, such as lipid conjugation, spherical nucleic acids, and other nanomaterial delivery vehicles, to facilitate cellular internalization.

[0072] Because dehybridization may occur for double-stranded conditional ASOs due to gradual dilution, bridging the 3′ terminus of the pM-ASO strand and the 5′ end of the locking strand could potentially reduce spontaneous activation, and provide reversibility of the conditional ASOs.

### Conditional Double Stranded Antisense Oligonucleotides

[0073] In certain embodiments, conditional double stranded antisense oligonucleotides are non-naturally occurring double stranded nucleobase polymer complexes comprising a first strand and a second strand, wherein the first strand is an antisense oligonucleotide connected to a segment that is partially identical to cell specific RNA, e.g., microRNA, and the second strand is a locking strand configured to release the first strand when in the presence of the cell specific RNA; thus, releasing the antisense oligonucleotide to alter the expression or degradation of a nucleic acid targeted by the antisense oligonucleotide in a manner limited to cells that express a specific RNA. In certain embodiments, the second strand contains a single stranded toehold segment that is designed to bind to the cell specific RNA facilitating the release of the first strand.

[0074] In certain embodiments, conditional double stranded antisense oligonucleotides are as illustrated in FIG. 7. In certain embodiments, the conditional double stranded antisense oligonucleotides are non-naturally occurring double stranded nucleobase polymer complexes comprising a first strand comprising, a first domain with a first segment of a cell specific RNA and a second domain that is complementary to a segment of target RNA; and a second strand comprising, a first domain that is complementary to the second domain of the first strand, a second domain that is complementary the first domain of the first strand second, and a third domain that is complementary to a second segment of the cell specific RNA, wherein the third domain is not complementary to the first strand providing a single stranded segment.

[0075] In certain embodiments, between the first domain of the first strand and the second domain of the first strand is one or more nucleobases that do not base pair with the second strand providing a bulge. In certain embodiments, the one or more nucleobases that do not base pair with the second strand are one, two, three, four, five or more nucleobases.

[0076] In certain embodiments, the after the second domain of the second strand there are one or more nucleobases that do not base pair with the second domain of the first strand providing a single stranded toehold segment on the 3′ end of the second strand.

[0077] In certain embodiments, the first domain of the first strand is on the 5′ end of the first strand. In certain embodiments, the second domain of the first strand is on the 3′ end of the first strand. In certain embodiments, the first domain of the second strand is on the 5′ end of the second strand. In certain embodiments, the second domain of the second strand is on the 3′ end of the first domain of the second strand. In certain embodiments, the third domain of the second strand is on the 3′ end of the second strand.

[0078] In certain embodiments, the cell specific RNA is microRNA. In certain embodiments, the cell specific RNA is hepatocyte-specific miRNA, miR-122. In certain embodiments, the microRNA is selected from: hsa-miR-576-3p (SEQ ID NO: 20), hsa-miR-140-5p (SEQ ID NO: 21), hsa-miR-522-5p (SEQ ID NO: 22), hsa-miR-1298-5p (SEQ ID NO: 23), hsa-miR-133a-3p (SEQ ID NO: 24), hsa-miR-4743-3p (SEQ ID NO: 25), hsa-miR-557 (SEQ ID NO: 26), hsa-miR-548ao-3p (SEQ ID NO: 27), hsa-miR-4649-5p (SEQ ID NO: 28), hsa-miR-5088-5p (SEQ ID NO: 29), hsa-miR-665 (SEQ ID NO: 30), hsa-miR-3622b-3p (SEQ ID NO: 31), hsa-miR-4493 (SEQ ID NO: 32), hsa-miR-1250-5p (SEQ ID NO: 33), hsa-miR-3622a-5p (SEQ ID NO: 34), hsa-miR-381-3p (SEQ ID NO: 35), hsa-miR-4709-3p (SEQ ID NO: 36), hsa-miR-6738-5p (SEQ ID NO: 37), hsa-miR-374b-3p (SEQ ID NO: 38), hsa-miR-7159-5p (SEQ ID NO: 39), hsa-miR-6874-3p (SEQ ID NO: 40), hsa-miR-448 (SEQ ID NO: 41), hsa-miR-548s (SEQ ID NO: 42), hsa-miR-515-5p (SEQ ID NO: 43), hsa-miR-6891-5p (SEQ ID NO: 44), hsa-miR-3940-5p (SEQ ID NO: 45), hsa-miR-431-3p (SEQ ID NO: 46), hsa-miR-103a-2-5p (SEQ ID NO: 47), hsa-miR-6832-5p (SEQ ID NO: 48), hsa-miR-6877-5p (SEQ ID NO: 49), hsa-miR-1298-3p (SEQ ID NO: 50), hsa-miR-3155a (SEQ ID NO: 51), hsa-miR-3682-5p (SEQ ID NO: 52), hsa-miR-5089-5p (SEQ ID NO: 53), hsa-miR-648 (SEQ ID NO: 54), hsa-miR-367-5p (SEQ ID NO: 55), hsa-miR-6740-5p (SEQ ID NO: 56), hsa-miR-450a-2-3p (SEQ ID NO: 57), hsa-miR-6793-3p (SEQ ID NO: 58), hsa-miR-541-5p (SEQ ID NO: 59), hsa-miR-3622a-3p (SEQ ID NO: 60), hsa-miR-6515-3p (SEQ ID NO: 61), hsa-miR-1276 (SEQ ID NO: 62), hsa-miR-6499-3p (SEQ ID NO: 63), hsa-miR-2276-3p (SEQ ID NO: 64), hsa-miR-3120-3p (SEQ ID NO: 65), hsa-miR-6780b-5p (SEQ ID NO: 66), hsa-miR-4769-5p (SEQ ID NO: 67), hsa-miR-1306-5p (SEQ ID NO: 68), hsa-miR-519b-3p (SEQ ID NO: 69), hsa-miR-489-3p (SEQ ID NO: 70), hsa-miR-23a-3p (SEQ ID NO: 71), hsa-miR-675-3p (SEQ ID NO: 72), hsa-miR-6796-5p (SEQ ID NO: 73), hsa-miR-1269a (SEQ ID NO: 74), hsa-miR-2110 (SEQ ID NO: 75), hsa-miR-483-3p (SEQ ID NO: 76), hsa-miR-4659a-3p (SEQ ID NO: 77), hsa-miR-1912-3p (SEQ ID NO: 78), hsa-miR-146a-5p (SEQ ID NO: 79), hsa-miR-1289 (SEQ ID NO: 80), hsa-miR-8485 (SEQ ID NO: 81), hsa-miR-563 (SEQ ID NO: 82), hsa-miR-425-3p (SEQ ID NO: 83), hsa-miR-4474-3p (SEQ ID NO: 84), hsa-miR-3672 (SEQ ID NO: 85), hsa-let-7a-3p (SEQ ID NO: 86), hsa-miR-5002-5p (SEQ ID NO: 87), hsa-miR-190b-3p (SEQ ID NO: 88), hsa-miR-4488 (SEQ ID NO: 89), hsa-miR-10527-5p (SEQ ID NO: 90), hsa-miR-3691-5p (SEQ ID NO: 91), hsa-miR-3688-5p (SEQ ID NO: 92), hsa-miR-532-3p (SEQ ID NO: 93), hsa-miR-4747-5p (SEQ ID NO: 94), hsa-miR-6813-3p (SEQ ID NO: 95), hsa-miR-3150b-3p (SEQ ID NO: 96), hsa-miR-6858-5p (SEQ ID NO: 97), hsa-miR-6768-3p (SEQ ID NO: 98), hsa-miR-4797-3p (SEQ ID NO: 99), hsa-miR-4684-5p (SEQ ID NO: 100), hsa-miR-4638-5p (SEQ ID NO: 101), hsa-miR-4300 (SEQ ID NO: 102), hsa-miR-6868-3p (SEQ ID NO: 103), hsa-miR-101-5p (SEQ ID NO: 104), hsa-miR-4650-3p (SEQ ID NO: 105), hsa-miR-548bc (SEQ ID NO: 106), hsa-miR-6771-3p (SEQ ID NO: 107), hsa-miR-6748-3p (SEQ ID NO: 108), hsa-miR-1248 (SEQ ID NO: 109), hsa-miR-4463 (SEQ ID NO: 110), hsa-miR-6794-5p (SEQ ID NO: 111), hsa-miR-4763-5p (SEQ ID NO: 112), hsa-miR-6132 (SEQ ID NO: 113), hsa-miR-1306-3p (SEQ ID NO: 114), hsa-miR-579-5p (SEQ ID NO: 115), hsa-miR-3917 (SEQ ID NO: 116), hsa-miR-4793-3p (SEQ ID NO: 117), hsa-miR-575 (SEQ ID NO: 118), hsa-miR-496 (SEQ ID NO: 119), hsa-miR-320c (SEQ ID NO: 120), hsa-miR-6818-3p UUGUCUCUUGUUCCUCACACAG (SEQ ID NO: 121), hsa-miR-661 (SEQ ID NO: 122), hsa-miR-3162-3p (SEQ ID NO: 123), hsa-miR-6797-5p (SEQ ID NO: 124), hsa-miR-5705 (SEQ ID NO: 125), hsa-miR-4722-5p (SEQ ID NO: 126), hsa-miR-4477a (SEQ ID NO: 127), hsa-miR-6767-3p (SEQ ID NO: 128), hsa-miR-424-3p (SEQ ID NO: 129), hsa-miR-499b-3p (SEQ ID NO: 130), hsa-miR-1277-5p (SEQ ID NO: 131), hsa-miR-1238-5p (SEQ ID NO: 132), hsa-miR-4799-5p (SEQ ID NO: 133), hsa-miR-3074-5p (SEQ ID NO: 134), hsa-miR-95-5p (SEQ ID NO: 135), hsa-miR-7157-5p (SEQ ID NO: 136), hsa-miR-4436a (SEQ ID NO: 137), hsa-miR-4634 (SEQ ID NO: 138), hsa-miR-10394-5p (SEQ ID NO: 139), hsa-miR-664b-5p (SEQ ID NO: 140), hsa-miR-4525 (SEQ ID NO: 141), hsa-miR-302c-5p (SEQ ID NO: 142), hsa-miR-486-3p (SEQ ID NO: 143), hsa-miR-449a (SEQ ID NO: 144), hsa-miR-5001-5p (SEQ ID NO: 145), hsa-miR-4765 (SEQ ID NO: 146), hsa-miR-3619-5p (SEQ ID NO: 147), hsa-miR-487b-3p (SEQ ID NO: 148), hsa-miR-766-3p (SEQ ID NO: 149), hsa-miR-7113-5p (SEQ ID NO: 150), hsa-miR-330-3p (SEQ ID NO: 151), hsa-miR-4257 (SEQ ID NO: 152), hsa-miR-4264 (SEQ ID NO: 153), hsa-miR-489-5p (SEQ ID NO: 154), hsa-miR-92b-5p (SEQ ID NO: 155), hsa-miR-6829-3p (SEQ ID NO: 156), hsa-miR-6766-3p (SEQ ID NO: 157), hsa-miR-5584-5p (SEQ ID NO: 158), hsa-miR-4710 (SEQ ID NO: 159), hsa-miR-3910 (SEQ ID NO: 160), hsa-miR-11400 (SEQ ID NO: 161), hsa-miR-10524-5p (SEQ ID NO: 162), hsa-miR-302e (SEQ ID NO: 163), hsa-miR-885-5p (SEQ ID NO: 164), hsa-miR-1282 (SEQ ID NO: 165), hsa-miR-4715-3p (SEQ ID NO: 166), hsa-miR-3124-5p (SEQ ID NO: 167), hsa-miR-103a-1-5p (SEQ ID NO: 168), hsa-miR-4750-5p (SEQ ID NO: 169), hsa-miR-191-3p (SEQ ID NO: 170), hsa-miR-6841-3p (SEQ ID NO: 171), hsa-miR-1301-5p (SEQ ID NO: 172), hsa-miR-3928-3p (SEQ ID NO: 173), hsa-miR-6799-5p (SEQ ID NO: 174), hsa-miR-20a-3p (SEQ ID NO: 175), hsa-miR-6787-3p (SEQ ID NO: 176), hsa-miR-1915-3p (SEQ ID NO: 177), hsa-miR-603 (SEQ ID NO: 178), hsa-miR-32-5p (SEQ ID NO: 179), hsa-miR-5706 (SEQ ID NO: 180), hsa-miR-6778-5p (SEQ ID NO: 181), hsa-miR-1301-3p (SEQ ID NO: 182), hsa-miR-3938 (SEQ ID NO: 183), hsa-miR-4777-5p (SEQ ID NO: 184), hsa-miR-371b-3p (SEQ ID NO: 185), hsa-miR-7112-3p (SEQ ID NO: 186), hsa-miR-370-3p (SEQ ID NO: 187), hsa-miR-574-3p (SEQ ID NO: 188), hsa-miR-4751 (SEQ ID NO: 189), hsa-miR-8071 (SEQ ID NO: 190), hsa-miR-23a-5p (SEQ ID NO: 191), hsa-miR-329-5p (SEQ ID NO: 192), hsa-miR-372-3p (SEQ ID NO: 193), hsa-miR-4479 (SEQ ID NO: 194), hsa-miR-105-3p (SEQ ID NO: 195), hsa-miR-4326 (SEQ ID NO: 196), hsa-let-7b-5p (SEQ ID NO: 197), hsa-miR-6751-5p (SEQ ID NO: 198), hsa-miR-3192-3p (SEQ ID NO: 199), hsa-miR-6856-3p (SEQ ID NO: 200), hsa-miR-6807-5p (SEQ ID NO: 201), hsa-miR-5680 (SEQ ID NO: 202), hsa-miR-6735-5p (SEQ ID NO: 203), hsa-miR-30a-5p (SEQ ID NO: 204), hsa-miR-1207-5p (SEQ ID NO: 205), hsa-miR-3189-3p (SEQ ID NO: 206), hsa-miR-4438 (SEQ ID NO: 207), hsa-miR-6844 (SEQ ID NO: 208), hsa-miR-6805-3p (SEQ ID NO: 209), hsa-miR-6880-5p (SEQ ID NO: 210), hsa-miR-302b-5p (SEQ ID NO: 211), hsa-miR-623 (SEQ ID NO: 212), hsa-miR-875-3p (SEQ ID NO: 213), hsa-miR-6869-3p (SEQ ID NO: 214), hsa-miR-657 (SEQ ID NO: 215), hsa-miR-4689 (SEQ ID NO: 216), hsa-miR-136-3p (SEQ ID NO: 217), hsa-miR-519a-3p (SEQ ID NO: 218), hsa-miR-9718 (SEQ ID NO: 219), hsa-miR-5003-3p (SEQ ID NO: 220), hsa-miR-576-5p (SEQ ID NO: 221), hsa-miR-371a-3p (SEQ ID NO: 222), hsa-miR-6762-3p (SEQ ID NO: 223), hsa-miR-586 (SEQ ID NO: 224), hsa-miR-621 (SEQ ID NO: 225), hsa-miR-6791-3p (SEQ ID NO: 226), hsa-miR-3150a-5p (SEQ ID NO: 227), hsa-miR-4436b-3p (SEQ ID NO: 228), hsa-miR-4664-5p (SEQ ID NO: 229), hsa-miR-3692-3p (SEQ ID NO: 230), hsa-miR-338-5p (SEQ ID NO: 231), hsa-miR-4693-3p (SEQ ID NO: 232), hsa-miR-543 (SEQ ID NO: 233), hsa-miR-151b (SEQ ID NO: 234), hsa-miR-211-3p (SEQ ID NO: 235), hsa-miR-7150 (SEQ ID NO: 236), hsa-miR-4445-3p (SEQ ID NO: 237), hsa-miR-96-5p (SEQ ID NO: 238), hsa-miR-5579-5p (SEQ ID NO: 239), hsa-miR-593-5p (SEQ ID NO: 240), hsa-miR-887-3p (SEQ ID NO: 241), hsa-miR-3689a-5p (SEQ ID NO: 242), hsa-miR-618 (SEQ ID NO: 243), hsa-miR-6504-3p (SEQ ID NO: 244), hsa-miR-1228-3p (SEQ ID NO: 245), hsa-miR-4282 (SEQ ID NO: 246), hsa-miR-106a-3p (SEQ ID NO: 247), hsa-miR-491-5p (SEQ ID NO: 248), hsa-miR-4685-3p (SEQ ID NO: 249), hsa-miR-548a1 (SEQ ID NO: 250), hsa-miR-6765-3p (SEQ ID NO: 251), hsa-miR-511-3p (SEQ ID NO: 252), hsa-miR-4286 (SEQ ID NO: 253), hsa-miR-627-3p (SEQ ID NO: 254), hsa-miR-644a (SEQ ID NO: 255), hsa-miR-124-5p (SEQ ID NO: 256), hsa-miR-6887-3p (SEQ ID NO: 257), hsa-miR-4449 (SEQ ID NO: 258), hsa-miR-641 (SEQ ID NO: 259), hsa-miR-1285-3p (SEQ ID NO: 260), hsa-miR-1193 (SEQ ID NO: 261), hsa-miR-3153 (SEQ ID NO: 262), hsa-miR-30a-3p (SEQ ID NO: 263), hsa-miR-4312 (SEQ ID NO: 264), hsa-miR-525-5p (SEQ ID NO: 265), hsa-miR-5006-5p (SEQ ID NO: 266), hsa-miR-203a-5p (SEQ ID NO: 267), hsa-miR-6733-3p (SEQ ID NO: 268), hsa-miR-4711-3p (SEQ ID NO: 269), hsa-miR-20b-5p (SEQ ID NO: 270), hsa-miR-5699-5p (SEQ ID NO: 271), hsa-miR-1260a (SEQ ID NO: 272), hsa-miR-5692c (SEQ ID NO: 273), hsa-miR-3161 (SEQ ID NO: 274), hsa-miR-6763-3p (SEQ ID NO: 275), hsa-miR-92a-1-5p (SEQ ID NO: 276), hsa-miR-548 h-3p (SEQ ID NO: 277), hsa-miR-4297 (SEQ ID NO: 278), hsa-miR-4457 (SEQ ID NO: 279), hsa-miR-3680-3p (SEQ ID NO: 280), hsa-miR-2392 (SEQ ID NO: 281), hsa-miR-548t-3p (SEQ ID NO: 282), hsa-miR-4784 (SEQ ID NO: 283), hsa-miR-1273c (SEQ ID NO: 284), hsa-miR-2682-3p (SEQ ID NO: 285), hsa-miR-7112-5p (SEQ ID NO: 286), hsa-miR-5690 (SEQ ID NO: 287), hsa-miR-5011-3p (SEQ ID NO: 288), hsa-miR-4431 (SEQ ID NO: 289), hsa-miR-4418 (SEQ ID NO: 290), hsa-miR-891a-5p (SEQ ID NO: 291), hsa-miR-378f (SEQ ID NO: 292), hsa-miR-183-3p (SEQ ID NO: 293), hsa-miR-3119 (SEQ ID NO: 294), hsa-miR-4640-3p (SEQ ID NO: 295), hsa-miR-3606-3p (SEQ ID NO: 296), hsa-miR-106b-5p (SEQ ID NO: 297), hsa-miR-4712-5p (SEQ ID NO: 298), hsa-miR-379-5p (SEQ ID NO: 299), hsa-miR-4678 (SEQ ID NO: 300), hsa-miR-3126-5p (SEQ ID NO: 301), hsa-miR-6069 (SEQ ID NO: 302), hsa-miR-1255b-5p (SEQ ID NO: 303), hsa-miR-6715a-3p (SEQ ID NO: 304), hsa-miR-4276 (SEQ ID NO: 305), hsa-miR-6812-3p (SEQ ID NO: 306), hsa-miR-4680-3p (SEQ ID NO: 307), hsa-let-7g-5p (SEQ ID NO: 308), hsa-miR-4757-3p (SEQ ID NO: 309), hsa-miR-4731-3p (SEQ ID NO: 310), hsa-miR-4645-5p (SEQ ID NO: 311), hsa-miR-4304 (SEQ ID NO: 312), hsa-miR-3658 (SEQ ID NO: 313), hsa-miR-4511 (SEQ ID NO: 314), hsa-miR-197-5p (SEQ ID NO: 315), hsa-miR-34b-3p (SEQ ID NO: 316), hsa-miR-6846-5p (SEQ ID NO: 317), hsa-miR-580-5p (SEQ ID NO: 318), hsa-miR-519e-5p (SEQ ID NO: 319), hsa-miR-106a-5p (SEQ ID NO: 320), hsa-miR-6715b-3p (SEQ ID NO: 321), hsa-miR-494-5p (SEQ ID NO: 322), hsa-miR-12124 (SEQ ID NO: 323), hsa-miR-4714-5p (SEQ ID NO: 324), hsa-miR-599 (SEQ ID NO: 325), hsa-miR-5697 (SEQ ID NO: 326), hsa-miR-216b-3p (SEQ ID NO: 327), hsa-miR-3692-5p (SEQ ID NO: 328), hsa-miR-4682 (SEQ ID NO: 329), hsa-miR-4519 (SEQ ID NO: 330), hsa-miR-6801-5p (SEQ ID NO: 331), hsa-miR-548v (SEQ ID NO: 332), hsa-miR-3661 (SEQ ID NO: 333), hsa-miR-4791 (SEQ ID NO: 334), hsa-miR-4638-3p (SEQ ID NO: 335), hsa-miR-214-5p (SEQ ID NO: 336), hsa-miR-513b-3p (SEQ ID NO: 337), hsa-miR-1296-5p (SEQ ID NO: 338), hsa-miR-6500-3p (SEQ ID NO: 339), hsa-miR-635 (SEQ ID NO: 340), hsa-miR-6892-5p (SEQ ID NO: 341), hsa-miR-328-3p (SEQ ID NO: 342), hsa-miR-372-5p (SEQ ID NO: 343), hsa-miR-1291 (SEQ ID NO: 344), hsa-miR-3912-3p (SEQ ID NO: 345), hsa-miR-526a-5p (SEQ ID NO: 346), hsa-miR-4673 (SEQ ID NO: 347), hsa-miR-885-3p (SEQ ID NO: 348), hsa-miR-10522-5p (SEQ ID NO: 349), hsa-miR-6075 (SEQ ID NO: 350), hsa-miR-495-5p (SEQ ID NO: 351), hsa-miR-4759 (SEQ ID NO: 352), hsa-miR-141-5p (SEQ ID NO: 353), hsa-miR-4484 (SEQ ID NO: 354), hsa-miR-643 (SEQ ID NO: 355), hsa-miR-4676-3p (SEQ ID NO: 356), hsa-miR-3169 (SEQ ID NO: 357), hsa-miR-4735-5p (SEQ ID NO: 358), hsa-miR-4756-3p (SEQ ID NO: 359), hsa-miR-1908-5p (SEQ ID NO: 360), hsa-miR-2277-3p (SEQ ID NO: 361), hsa-miR-3162-5p (SEQ ID NO: 362), hsa-miR-551b-3p (SEQ ID NO: 363), hsa-miR-5739 (SEQ ID NO: 364), hsa-miR-6893-5p (SEQ ID NO: 365), hsa-miR-548ae-3p (SEQ ID NO: 366), hsa-miR-6821-3p (SEQ ID NO: 367), hsa-miR-378i (SEQ ID NO: 368), hsa-miR-323b-5p (SEQ ID NO: 369), hsa-miR-4539 (SEQ ID NO: 370), hsa-miR-375-3p (SEQ ID NO: 371), hsa-miR-518a-5p (SEQ ID NO: 372), hsa-miR-608 (SEQ ID NO: 373), hsa-miR-770-5p (SEQ ID NO: 374), hsa-miR-6514-5p (SEQ ID NO: 375), hsa-miR-3615 (SEQ ID NO: 376), hsa-miR-3621 (SEQ ID NO: 377), hsa-miR-4508 (SEQ ID NO: 378), hsa-miR-6839-3p (SEQ ID NO: 379), hsa-miR-4698 (SEQ ID NO: 380), hsa-miR-4521 (SEQ ID NO: 381), hsa-miR-33a-5p (SEQ ID NO: 382), hsa-miR-1287-5p (SEQ ID NO: 383), hsa-miR-4650-5p (SEQ ID NO: 384), hsa-miR-154-5p (SEQ ID NO: 385), hsa-miR-1912-5p (SEQ ID NO: 386), hsa-miR-449b-3p (SEQ ID NO: 387), hsa-miR-6857-3p (SEQ ID NO: 388), hsa-miR-3617-3p (SEQ ID NO: 389), hsa-miR-4253 (SEQ ID NO: 390), hsa-miR-216b-5p (SEQ ID NO: 391), hsa-miR-6817-3p (SEQ ID NO: 392), hsa-miR-1226-3p (SEQ ID NO: 393), hsa-miR-127-3p (SEQ ID NO: 394), hsa-miR-2681-5p (SEQ ID NO: 395), hsa-miR-23b-3p (SEQ ID NO: 396), hsa-miR-5004-3p (SEQ ID NO: 397), hsa-miR-3613-5p (SEQ ID NO: 398), hsa-miR-3614-5p (SEQ ID NO: 399), hsa-miR-10394-3p (SEQ ID NO: 400), hsa-miR-6779-3p (SEQ ID NO: 401), hsa-miR-718 (SEQ ID NO: 402), hsa-miR-4718 (SEQ ID NO: 403), hsa-miR-98-3p (SEQ ID NO: 404), hsa-miR-325 (SEQ ID NO: 405), hsa-miR-6795-3p (SEQ ID NO: 406), hsa-miR-5195-5p (SEQ ID NO: 407), hsa-miR-6501-5p (SEQ ID NO: 408), hsa-miR-4520-5p (SEQ ID NO: 409), hsa-miR-4774-3p (SEQ ID NO: 410), hsa-miR-4323 (SEQ ID NO: 411), hsa-miR-4750-3p (SEQ ID NO: 412), hsa-miR-4665-5p (SEQ ID NO: 413), hsa-miR-302a-3p (SEQ ID NO: 414), hsa-miR-6790-3p (SEQ ID NO: 415), hsa-miR-148b-5p (SEQ ID NO: 416), hsa-miR-3129-5p (SEQ ID NO: 417), hsa-miR-4299 (SEQ ID NO: 418), hsa-miR-3972 (SEQ ID NO: 419), hsa-miR-1843 (SEQ ID NO: 420), hsa-miR-5197-5p (SEQ ID NO: 421), hsa-miR-1343-5p (SEQ ID NO: 422), hsa-miR-3960 (SEQ ID NO: 423), hsa-miR-4303 (SEQ ID NO: 424), hsa-miR-3132 (SEQ ID NO: 425), hsa-miR-31-5p (SEQ ID NO: 426), hsa-miR-518f-3p (SEQ ID NO: 427), hsa-miR-541-3p (SEQ ID NO: 428), hsa-miR-126-5p (SEQ ID NO: 429), hsa-miR-6825-3p (SEQ ID NO: 430), hsa-miR-6770-3p (SEQ ID NO: 431), hsa-miR-4420 (SEQ ID NO: 432), hsa-miR-488-5p (SEQ ID NO: 433), hsa-miR-1258 (SEQ ID NO: 434), hsa-miR-3138 (SEQ ID NO: 435), hsa-miR-4662b (SEQ ID NO: 436), hsa-miR-6881-3p (SEQ ID NO: 437), hsa-miR-3142 (SEQ ID NO: 438), hsa-miR-6775-3p (SEQ ID NO: 439), hsa-miR-6864-5p (SEQ ID NO: 440), hsa-miR-6721-5p (SEQ ID NO: 441), hsa-miR-6782-3p (SEQ ID NO: 442), hsa-miR-7106-5p (SEQ ID NO: 443), hsa-miR-139-3p (SEQ ID NO: 444), hsa-miR-554 (SEQ ID NO: 445), hsa-miR-491-3p (SEQ ID NO: 446), hsa-miR-4659a-5p (SEQ ID NO: 447), hsa-miR-4778-3p (SEQ ID NO: 448), hsa-miR-6882-3p (SEQ ID NO: 449), hsa-miR-4261 (SEQ ID NO: 450), hsa-miR-6754-5p (SEQ ID NO: 451), hsa-miR-376c-3p (SEQ ID NO: 452), hsa-miR-12114 (SEQ ID NO: 453), hsa-miR-6826-3p (SEQ ID NO: 454), hsa-miR-30b-5p (SEQ ID NO: 455), hsa-miR-6867-3p (SEQ ID NO: 456), hsa-miR-5687 (SEQ ID NO: 457), hsa-miR-9-3p (SEQ ID NO: 458), hsa-miR-2681-3p (SEQ ID NO: 459), hsa-miR-6858-3p (SEQ ID NO: 460), hsa-miR-4697-5p (SEQ ID NO: 461), hsa-miR-3684 (SEQ ID NO: 462), hsa-miR-634 (SEQ ID NO: 463), hsa-miR-208a-5p (SEQ ID NO: 464), hsa-miR-12133 (SEQ ID NO: 465), hsa-miR-567 (SEQ ID NO: 466), hsa-miR-3191-3p (SEQ ID NO: 467), hsa-miR-4524b-5p (SEQ ID NO: 468), hsa-miR-6726-5p (SEQ ID NO: 469), hsa-miR-2052 (SEQ ID NO: 470), hsa-miR-6797-3p (SEQ ID NO: 471), hsa-miR-1914-5p (SEQ ID NO: 472), hsa-miR-330-5p (SEQ ID NO: 473), hsa-miR-3197 (SEQ ID NO: 474), hsa-miR-139-5p (SEQ ID NO: 475), hsa-miR-10401-3p (SEQ ID NO: 476), hsa-miR-941 (SEQ ID NO: 477), hsa-miR-6761-5p (SEQ ID NO: 478), hsa-miR-4795-5p (SEQ ID NO: 479), hsa-miR-301a-5p (SEQ ID NO: 480), hsa-miR-181b-3p (SEQ ID NO: 481), hsa-miR-5047 (SEQ ID NO: 482), hsa-miR-548ap-3p (SEQ ID NO: 483), hsa-miR-571 (SEQ ID NO: 484), hsa-miR-492 (SEQ ID NO: 485), hsa-miR-6855-3p (SEQ ID NO: 486), hsa-miR-340-3p (SEQ ID NO: 487), hsa-miR-3160-3p (SEQ ID NO: 488), hsa-miR-126-3p (SEQ ID NO: 489), hsa-miR-4446-5p (SEQ ID NO: 490), hsa-miR-4742-5p (SEQ ID NO: 491), hsa-miR-451a (SEQ ID NO: 492), hsa-miR-548ag (SEQ ID NO: 493), hsa-miR-3194-3p (SEQ ID NO: 494), hsa-miR-8076 (SEQ ID NO: 495), hsa-miR-7151-5p (SEQ ID NO: 496), hsa-miR-4709-5p (SEQ ID NO: 497), hsa-miR-2277-5p (SEQ ID NO: 498), hsa-miR-6784-5p (SEQ ID NO: 499), hsa-miR-3125 (SEQ ID NO: 500), hsa-miR-4476 (SEQ ID NO: 501), hsa-miR-103a-3p (SEQ ID NO: 502), hsa-miR-4498 (SEQ ID NO: 503), hsa-miR-4472 (SEQ ID NO: 504), hsa-let-7i-3p (SEQ ID NO: 505), hsa-miR-199b-5p (SEQ ID NO: 506), hsa-miR-383-3p (SEQ ID NO: 507), hsa-miR-5702 (SEQ ID NO: 508), hsa-miR-4696 (SEQ ID NO: 509), hsa-miR-8062 (SEQ ID NO: 510), hsa-miR-518e-3p (SEQ ID NO: 511), hsa-miR-7114-5p (SEQ ID NO: 512), hsa-miR-6821-5p (SEQ ID NO: 513), hsa-miR-6879-3p (SEQ ID NO: 514), hsa-miR-5580-5p (SEQ ID NO: 515), hsa-miR-8079 (SEQ ID NO: 516), hsa-miR-527 (SEQ ID NO: 517), hsa-miR-450a-1-3p (SEQ ID NO: 518), hsa-miR-4499 (SEQ ID NO: 519), hsa-miR-4781-5p (SEQ ID NO: 520), hsa-miR-1321 (SEQ ID NO: 521), hsa-miR-585-3p (SEQ ID NO: 522), hsa-miR-4305 (SEQ ID NO: 523), hsa-miR-2276-5p (SEQ ID NO: 524), hsa-miR-329-3p (SEQ ID NO: 525), hsa-miR-1915-5p (SEQ ID NO: 526), hsa-miR-224-5p (SEQ ID NO: 527), hsa-miR-6840-3p (SEQ ID NO: 528), hsa-miR-6072 (SEQ ID NO: 529), hsa-miR-6079 (SEQ ID NO: 530), hsa-miR-548ax (SEQ ID NO: 531), hsa-miR-6511b-5p (SEQ ID NO: 532), hsa-miR-144-3p (SEQ ID NO: 533), hsa-miR-4700-5p (SEQ ID NO: 534), hsa-miR-3945 (SEQ ID NO: 535), hsa-miR-4442 (SEQ ID NO: 536), hsa-miR-4713-5p (SEQ ID NO: 537), hsa-miR-520 h (SEQ ID NO: 538), hsa-miR-520e-3p (SEQ ID NO: 539), hsa-miR-499a-5p (SEQ ID NO: 540), hsa-miR-3616-3p (SEQ ID NO: 541), hsa-miR-4311 (SEQ ID NO: 542), hsa-miR-374a-3p (SEQ ID NO: 543), hsa-miR-4514 (SEQ ID NO: 544), hsa-miR-141-3p (SEQ ID NO: 545), hsa-miR-6856-5p (SEQ ID NO: 546), hsa-miR-339-5p (SEQ ID NO: 547), hsa-miR-186-5p (SEQ ID NO: 548), hsa-miR-486-5p (SEQ ID NO: 549), hsa-miR-3927-5p (SEQ ID NO: 550), hsa-miR-7515 (SEQ ID NO: 551), hsa-miR-548ay-5p (SEQ ID NO: 552), hsa-miR-548j-5p (SEQ ID NO: 553), hsa-miR-3936 (SEQ ID NO: 554), hsa-miR-4320 (SEQ ID NO: 555), hsa-miR-1273 h-5p (SEQ ID NO: 556), hsa-miR-4782-3p (SEQ ID NO: 557), hsa-miR-6823-3p (SEQ ID NO: 558), hsa-miR-218-5p (SEQ ID NO: 559), hsa-miR-3117-5p (SEQ ID NO: 560), hsa-miR-663b (SEQ ID NO: 561), hsa-miR-1279 (SEQ ID NO: 562), hsa-miR-4656 (SEQ ID NO: 563), hsa-miR-135a-5p (SEQ ID NO: 564), hsa-miR-3186-5p (SEQ ID NO: 565), hsa-miR-3922-5p (SEQ ID NO: 566), hsa-miR-6785-5p (SEQ ID NO: 567), hsa-miR-2053 (SEQ ID NO: 568), hsa-miR-376c-5p (SEQ ID NO: 569), hsa-miR-93-5p (SEQ ID NO: 570), hsa-miR-1587 (SEQ ID NO: 571), hsa-miR-6816-5p (SEQ ID NO: 572), hsa-miR-4452 (SEQ ID NO: 573), hsa-miR-548k (SEQ ID NO: 574), hsa-miR-6736-5p (SEQ ID NO: 575), hsa-miR-1236-5p (SEQ ID NO: 576), hsa-miR-764 (SEQ ID NO: 577), hsa-miR-10395-5p (SEQ ID NO: 578), hsa-miR-208b-5p (SEQ ID NO: 579), hsa-miR-6866-3p (SEQ ID NO: 580), hsa-miR-518f-5p (SEQ ID NO: 581), hsa-miR-4330 (SEQ ID NO: 582), hsa-miR-6511b-3p (SEQ ID NO: 583), hsa-miR-6750-5p (SEQ ID NO: 584), hsa-miR-4501 (SEQ ID NO: 585), hsa-miR-8067 (SEQ ID NO: 586), hsa-miR-196a-1-3p (SEQ ID NO: 587), hsa-miR-4803 (SEQ ID NO: 588), hsa-miR-887-5p (SEQ ID NO: 589), hsa-miR-6509-3p (SEQ ID NO: 590), hsa-miR-7107-5p (SEQ ID NO: 591), hsa-miR-4772-3p (SEQ ID NO: 592), hsa-miR-614 (SEQ ID NO: 593), hsa-miR-3193 (SEQ ID NO: 594), hsa-miR-1250-3p (SEQ ID NO: 595), hsa-miR-4783-3p (SEQ ID NO: 596), hsa-miR-10396a-5p (SEQ ID NO: 597), hsa-miR-6761-3p (SEQ ID NO: 598), hsa-miR-379-3p (SEQ ID NO: 599), hsa-miR-6734-3p (SEQ ID NO: 600), hsa-miR-892a (SEQ ID NO: 601), hsa-miR-1304-3p (SEQ ID NO: 602), hsa-miR-4530 (SEQ ID NO: 603), hsa-miR-4707-5p (SEQ ID NO: 604), hsa-miR-6068 (SEQ ID NO: 605), hsa-miR-24-1-5p (SEQ ID NO: 606), hsa-miR-3689e (SEQ ID NO: 607), hsa-miR-5584-3p (SEQ ID NO: 608), hsa-miR-5010-5p (SEQ ID NO: 609), hsa-miR-6125 (SEQ ID NO: 610), hsa-miR-4424 (SEQ ID NO: 611), hsa-miR-6835-3p (SEQ ID NO: 612), hsa-miR-7703 (SEQ ID NO: 613), hsa-miR-652-5p (SEQ ID NO: 614), hsa-miR-3691-3p (SEQ ID NO: 615), hsa-miR-4272 (SEQ ID NO: 616), hsa-miR-3183 (SEQ ID NO: 617), hsa-miR-6863 (SEQ ID NO: 618), hsa-miR-3942-3p (SEQ ID NO: 619), hsa-miR-1244 (SEQ ID NO: 620), hsa-miR-6812-5p (SEQ ID NO: 621), hsa-miR-373-5p (SEQ ID NO: 622), hsa-miR-556-3p (SEQ ID NO: 623), hsa-miR-564 (SEQ ID NO: 624), hsa-miR-548o-5p (SEQ ID NO: 625), hsa-miR-367-3p (SEQ ID NO: 626), hsa-miR-601 (SEQ ID NO: 627), hsa-miR-4327 (SEQ ID NO: 628), hsa-miR-4665-3p (SEQ ID NO: 629), hsa-miR-4437 (SEQ ID NO: 630), hsa-miR-548aq-3p (SEQ ID NO: 631), hsa-miR-5191 (SEQ ID NO: 632), hsa-miR-4738-3p (SEQ ID NO: 633), hsa-miR-876-3p (SEQ ID NO: 634), hsa-miR-3922-3p (SEQ ID NO: 635), hsa-miR-423-5p (SEQ ID NO: 636), hsa-miR-6792-3p (SEQ ID NO: 637), hsa-miR-9901 (SEQ ID NO: 638), hsa-miR-1272 (SEQ ID NO: 639), hsa-miR-200a-3p (SEQ ID NO: 640), hsa-miR-4434 (SEQ ID NO: 641), hsa-miR-6870-5p (SEQ ID NO: 642), hsa-miR-509-5p (SEQ ID NO: 643), hsa-miR-4313 (SEQ ID NO: 644), hsa-miR-944 (SEQ ID NO: 645), hsa-miR-3184-3p (SEQ ID NO: 646), hsa-miR-548e-3p (SEQ ID NO: 647), hsa-miR-29b-1-5p (SEQ ID NO: 648), hsa-miR-548ac (SEQ ID NO: 649), hsa-miR-1265 (SEQ ID NO: 650), hsa-miR-1343-3p (SEQ ID NO: 651), hsa-miR-515-3p (SEQ ID NO: 652), hsa-miR-5694 (SEQ ID NO: 653), hsa-miR-3166 (SEQ ID NO: 654), hsa-miR-137-5p (SEQ ID NO: 655), hsa-miR-10395-3p (SEQ ID NO: 656), hsa-miR-203b-5p (SEQ ID NO: 657), hsa-miR-410-3p (SEQ ID NO: 658), hsa-miR-4317 (SEQ ID NO: 659), hsa-miR-365b-3p (SEQ ID NO: 660), hsa-miR-3164 (SEQ ID NO: 661), hsa-miR-216a-5p (SEQ ID NO: 662), hsa-miR-514a-5p (SEQ ID NO: 663), hsa-miR-3190-5p (SEQ ID NO: 664), hsa-miR-6795-5p (SEQ ID NO: 665), hsa-miR-12126 (SEQ ID NO: 666), hsa-miR-4467 (SEQ ID NO: 667), hsa-miR-155-5p (SEQ ID NO: 668), hsa-miR-6734-5p (SEQ ID NO: 669), hsa-miR-1183 (SEQ ID NO: 670), hsa-miR-548x-3p (SEQ ID NO: 671), hsa-miR-3144-5p (SEQ ID NO: 672), hsa-miR-4694-3p (SEQ ID NO: 673), hsa-let-7d-3p (SEQ ID NO: 674), hsa-miR-11399 (SEQ ID NO: 675), hsa-miR-520g-5p (SEQ ID NO: 676), hsa-miR-7854-3p (SEQ ID NO: 677), hsa-miR-3652 (SEQ ID NO: 678), hsa-miR-1275 (SEQ ID NO: 679), hsa-miR-500a-3p (SEQ ID NO: 680), hsa-miR-498-5p (SEQ ID NO: 681), hsa-miR-552-3p (SEQ ID NO: 682), hsa-miR-22-3p (SEQ ID NO: 683), hsa-miR-219a-2-3p (SEQ ID NO: 684), hsa-miR-411-5p (SEQ ID NO: 685), hsa-miR-570-5p (SEQ ID NO: 686), hsa-miR-1288-5p (SEQ ID NO: 687), hsa-miR-6884-3p (SEQ ID NO: 688), hsa-miR-891b (SEQ ID NO: 689), hsa-miR-3606-5p (SEQ ID NO: 690), hsa-miR-1247-3p (SEQ ID NO: 691), hsa-miR-3147 (SEQ ID NO: 692), hsa-miR-5700 (SEQ ID NO: 693), hsa-miR-1252-3p (SEQ ID NO: 694), hsa-miR-4653-3p (SEQ ID NO: 695), hsa-miR-5090 (SEQ ID NO: 696), hsa-miR-365a-3p (SEQ ID NO: 697), hsa-miR-7154-3p (SEQ ID NO: 698), hsa-miR-3179 (SEQ ID NO: 699), hsa-miR-6792-5p (SEQ ID NO: 700), hsa-miR-3152-5p (SEQ ID NO: 701), hsa-miR-744-3p (SEQ ID NO: 702), hsa-miR-138-2-3p (SEQ ID NO: 703), hsa-miR-8084 (SEQ ID NO: 704), hsa-miR-5707 (SEQ ID NO: 705), hsa-miR-8081 (SEQ ID NO: 706), hsa-miR-502-3p (SEQ ID NO: 707), hsa-miR-3937 (SEQ ID NO: 708), hsa-miR-3064-5p (SEQ ID NO: 709), hsa-miR-509-3-5p (SEQ ID NO: 710), hsa-miR-889-5p (SEQ ID NO: 711), hsa-miR-6745 (SEQ ID NO: 712), hsa-miR-3918 (SEQ ID NO: 713), hsa-miR-4755-5p (SEQ ID NO: 714), hsa-miR-3619-3p (SEQ ID NO: 715), hsa-miR-500b-5p (SEQ ID NO: 716), hsa-miR-192-3p (SEQ ID NO: 717), hsa-miR-4296 (SEQ ID NO: 718), hsa-miR-873-5p (SEQ ID NO: 719), hsa-miR-517a-3p (SEQ ID NO: 720), hsa-miR-1266-3p (SEQ ID NO: 721), hsa-miR-1233-5p (SEQ ID NO: 722), hsa-miR-2114-5p (SEQ ID NO: 723), hsa-miR-222-5p (SEQ ID NO: 724), hsa-miR-542-3p (SEQ ID NO: 725), hsa-miR-4768-5p (SEQ ID NO: 726), hsa-miR-589-5p (SEQ ID NO: 727), hsa-miR-12116 (SEQ ID NO: 728), hsa-miR-16-1-3p (SEQ ID NO: 729), hsa-miR-517b-3p (SEQ ID NO: 730), hsa-miR-181c-3p (SEQ ID NO: 731), hsa-miR-624-3p (SEQ ID NO: 732), hsa-miR-548o-3p (SEQ ID NO: 733), hsa-miR-4777-3p (SEQ ID NO: 734), hsa-miR-6766-5p (SEQ ID NO: 735), hsa-miR-181a-2-3p (SEQ ID NO: 736), hsa-miR-6529-5p (SEQ ID NO: 737), hsa-miR-6814-5p (SEQ ID NO: 738), hsa-miR-4732-3p (SEQ ID NO: 739), hsa-miR-335-3p (SEQ ID NO: 740), hsa-miR-5581-5p (SEQ ID NO: 741), hsa-miR-875-5p (SEQ ID NO: 742), hsa-miR-27a-5p (SEQ ID NO: 743), hsa-miR-942-3p (SEQ ID NO: 744), hsa-miR-4269 (SEQ ID NO: 745), hsa-miR-376a-2-5p (SEQ ID NO: 746), hsa-miR-1245a (SEQ ID NO: 747), hsa-miR-650 (SEQ ID NO: 748), hsa-miR-6884-5p (SEQ ID NO: 749), hsa-miR-1184 (SEQ ID NO: 750), hsa-miR-4256 (SEQ ID NO: 751), hsa-miR-517-5p (SEQ ID NO: 752), hsa-miR-4480 (SEQ ID NO: 753), hsa-miR-4635 (SEQ ID NO: 754), hsa-miR-4531 (SEQ ID NO: 755), hsa-miR-6892-3p (SEQ ID NO: 756), hsa-miR-4797-5p (SEQ ID NO: 757), hsa-miR-18b-5p (SEQ ID NO: 758), hsa-miR-18a-5p (SEQ ID NO: 759), hsa-miR-4778-5p (SEQ ID NO: 760), hsa-miR-3943 (SEQ ID NO: 761), hsa-miR-6773-3p (SEQ ID NO: 762), hsa-miR-6507-3p (SEQ ID NO: 763), hsa-miR-7-1-3p (SEQ ID NO: 764), hsa-miR-378j (SEQ ID NO: 765), hsa-miR-6839-5p (SEQ ID NO: 766), hsa-miR-6788-3p (SEQ ID NO: 767), hsa-miR-337-5p (SEQ ID NO: 768), hsa-miR-4800-3p (SEQ ID NO: 769), hsa-miR-374a-5p (SEQ ID NO: 770), hsa-miR-6513-3p (SEQ ID NO: 771), hsa-miR-4524a-5p (SEQ ID NO: 772), hsa-miR-28-3p (SEQ ID NO: 773), hsa-miR-4640-5p (SEQ ID NO: 774), hsa-miR-3611 (SEQ ID NO: 775), hsa-miR-8070 (SEQ ID NO: 776), hsa-miR-10a-5p (SEQ ID NO: 777), hsa-miR-29b-2-5p (SEQ ID NO: 778), hsa-miR-4727-3p (SEQ ID NO: 779), hsa-miR-561-3p (SEQ ID NO: 780), hsa-miR-514b-5p (SEQ ID NO: 781), hsa-miR-638 (SEQ ID NO: 782), hsa-miR-6516-5p (SEQ ID NO: 783), hsa-miR-3146 (SEQ ID NO: 784), hsa-miR-4707-3p (SEQ ID NO: 785), hsa-miR-6860 (SEQ ID NO: 786), hsa-miR-10396b-3p (SEQ ID NO: 787), hsa-miR-4267 (SEQ ID NO: 788), hsa-miR-4325 (SEQ ID NO: 789), hsa-miR-510-5p (SEQ ID NO: 790), hsa-miR-5587-3p (SEQ ID NO: 791), hsa-miR-490-3p (SEQ ID NO: 792), hsa-miR-4726-5p (SEQ ID NO: 793), hsa-miR-647 (SEQ ID NO: 794), hsa-miR-4726-3p (SEQ ID NO: 795), hsa-miR-559 (SEQ ID NO: 796), hsa-miR-101-3p (SEQ ID NO: 797), hsa-miR-4644 (SEQ ID NO: 798), hsa-miR-6716-5p (SEQ ID NO: 799), hsa-miR-301b-5p (SEQ ID NO: 800), hsa-miR-127-5p (SEQ ID NO: 801), hsa-miR-3134 (SEQ ID NO: 802), hsa-miR-4663 (SEQ ID NO: 803), hsa-miR-193b-3p (SEQ ID NO: 804), hsa-miR-589-3p (SEQ ID NO: 805), hsa-miR-520e-5p (SEQ ID NO: 806), hsa-miR-6861-3p (SEQ ID NO: 807), hsa-miR-6722-5p (SEQ ID NO: 808), hsa-miR-7853-5p (SEQ ID NO: 809), hsa-miR-5194 (SEQ ID NO: 810), hsa-miR-520a-3p (SEQ ID NO: 811), hsa-miR-3192-5p (SEQ ID NO: 812), hsa-miR-597-3p (SEQ ID NO: 813), hsa-miR-6836-3p (SEQ ID NO: 814), hsa-miR-548x-5p (SEQ ID NO: 815), hsa-miR-6888-3p (SEQ ID NO: 816), hsa-miR-6793-5p (SEQ ID NO: 817), hsa-miR-8075 (SEQ ID NO: 818), hsa-miR-1471 (SEQ ID NO: 819), hsa-miR-5590-3p (SEQ ID NO: 820), hsa-miR-24-3p (SEQ ID NO: 821), hsa-miR-6825-5p (SEQ ID NO: 822), hsa-miR-3934-5p (SEQ ID NO: 823), hsa-miR-6508-5p (SEQ ID NO: 824), hsa-miR-1238-3p (SEQ ID NO: 825), hsa-miR-598-3p (SEQ ID NO: 826), hsa-miR-548an (SEQ ID NO: 827), hsa-miR-6773-5p (SEQ ID NO: 828), hsa-miR-134-5p (SEQ ID NO: 829), hsa-miR-7157-3p (SEQ ID NO: 830), hsa-miR-4512 (SEQ ID NO: 831), hsa-miR-6733-5p (SEQ ID NO: 832), hsa-miR-6749-5p (SEQ ID NO: 833), hsa-miR-182-3p (SEQ ID NO: 834), hsa-miR-625-3p (SEQ ID NO: 835), hsa-miR-616-5p (SEQ ID NO: 836), hsa-miR-138-5p (SEQ ID NO: 837), hsa-miR-4448 (SEQ ID NO: 838), hsa-miR-4430 (SEQ ID NO: 839), hsa-miR-3065-3p (SEQ ID NO: 840), hsa-miR-3117-3p (SEQ ID NO: 841), hsa-miR-6852-3p (SEQ ID NO: 842), hsa-miR-6505-5p (SEQ ID NO: 843), hsa-miR-365a-5p (SEQ ID NO: 844), hsa-miR-6816-3p (SEQ ID NO: 845), hsa-miR-539-3p (SEQ ID NO: 846), hsa-miR-380-3p (SEQ ID NO: 847), hsa-miR-4487 (SEQ ID NO: 848), hsa-miR-548n (SEQ ID NO: 849), hsa-miR-9851-3p (SEQ ID NO: 850), hsa-miR-122b-3p (SEQ ID NO: 851), hsa-miR-892b (SEQ ID NO: 852), hsa-miR-6805-5p (SEQ ID NO: 853), hsa-miR-3942-5p (SEQ ID NO: 854), hsa-miR-1245b-5p (SEQ ID NO: 855), hsa-let-7e-3p (SEQ ID NO: 856), hsa-miR-659-5p (SEQ ID NO: 857), hsa-miR-3191-5p (SEQ ID NO: 858), hsa-miR-6886-3p (SEQ ID NO: 859), hsa-miR-3180-3p (SEQ ID NO: 860), hsa-miR-2467-5p (SEQ ID NO: 861), hsa-miR-5688 (SEQ ID NO: 862), hsa-miR-6872-3p (SEQ ID NO: 863), hsa-miR-1288-3p (SEQ ID NO: 864), hsa-miR-3679-5p (SEQ ID NO: 865), hsa-miR-4494 (SEQ ID NO: 866), hsa-miR-6867-5p (SEQ ID NO: 867), hsa-miR-548c-5p (SEQ ID NO: 868), hsa-miR-128-1-5p (SEQ ID NO: 869), hsa-miR-7704 (SEQ ID NO: 870), hsa-miR-664b-3p (SEQ ID NO: 871), hsa-miR-15b-3p (SEQ ID NO: 872), hsa-miR-4697-3p (SEQ ID NO: 873), hsa-miR-4458 (SEQ ID NO: 874), hsa-miR-196b-5p (SEQ ID NO: 875), hsa-miR-4645-3p (SEQ ID NO: 876), hsa-miR-181b-5p (SEQ ID NO: 877), hsa-miR-219b-5p (SEQ ID NO: 878), hsa-miR-3934-3p (SEQ ID NO: 879), hsa-miR-4746-3p (SEQ ID NO: 880), hsa-miR-1266-5p (SEQ ID NO: 881), hsa-miR-6791-5p (SEQ ID NO: 882), hsa-miR-409-5p (SEQ ID NO: 883), hsa-miR-508-5p (SEQ ID NO: 884), hsa-miR-3909 (SEQ ID NO: 885), hsa-miR-4504 (SEQ ID NO: 886), hsa-miR-6850-5p (SEQ ID NO: 887), hsa-miR-3683 (SEQ ID NO: 888), hsa-miR-587 (SEQ ID NO: 889), hsa-miR-4469 (SEQ ID NO: 890), hsa-miR-6804-3p (SEQ ID NO: 891), hsa-miR-510-3p (SEQ ID NO: 892), hsa-miR-624-5p (SEQ ID NO: 893), hsa-miR-548ap-5p (SEQ ID NO: 894), hsa-miR-193b-5p (SEQ ID NO: 895), hsa-miR-3151-3p (SEQ ID NO: 896), hsa-miR-1304-5p (SEQ ID NO: 897), hsa-miR-6074 (SEQ ID NO: 898), hsa-miR-7155-3p (SEQ ID NO: 899), hsa-miR-550a-5p (SEQ ID NO: 900), hsa-miR-8087 (SEQ ID NO: 901), hsa-miR-6510-5p (SEQ ID NO: 902), hsa-miR-3605-5p (SEQ ID NO: 903), hsa-miR-1268b (SEQ ID NO: 904), hsa-miR-6129 (SEQ ID NO: 905), hsa-miR-6857-5p (SEQ ID NO: 906), hsa-miR-215-3p (SEQ ID NO: 907), hsa-miR-10398-5p (SEQ ID NO: 908), hsa-miR-30b-3p (SEQ ID NO: 909), hsa-miR-4687-3p (SEQ ID NO: 910), hsa-miR-519a-2-5p (SEQ ID NO: 911), hsa-miR-4794 (SEQ ID NO: 912), hsa-miR-6727-3p (SEQ ID NO: 913), hsa-miR-516a-5p (SEQ ID NO: 914), hsa-miR-6806-5p (SEQ ID NO: 915), hsa-miR-29b-3p (SEQ ID NO: 916), hsa-miR-4713-3p (SEQ ID NO: 917), hsa-miR-12123 (SEQ ID NO: 918), hsa-miR-4433b-5p (SEQ ID NO: 919), hsa-miR-6755-3p (SEQ ID NO: 920), hsa-miR-4659b-3p (SEQ ID NO: 921), hsa-miR-6513-5p (SEQ ID NO: 922), hsa-miR-8052 (SEQ ID NO: 923), hsa-miR-6872-5p (SEQ ID NO: 924), hsa-miR-431-5p (SEQ ID NO: 925), hsa-miR-5011-5p (SEQ ID NO: 926), hsa-miR-7974 (SEQ ID NO: 927), hsa-miR-548ar-5p (SEQ ID NO: 928), hsa-miR-200b-3p (SEQ ID NO: 929), hsa-miR-6768-5p (SEQ ID NO: 930), hsa-miR-6516-3p (SEQ ID NO: 931), hsa-miR-1249-5p (SEQ ID NO: 932), hsa-miR-3201 (SEQ ID NO: 933), hsa-miR-6499-5p (SEQ ID NO: 934), hsa-miR-1305 (SEQ ID NO: 935), hsa-miR-937-3p (SEQ ID NO: 936), hsa-miR-432-3p (SEQ ID NO: 937), hsa-miR-6870-3p (SEQ ID NO: 938), hsa-miR-6510-3p (SEQ ID NO: 939), hsa-miR-3660 (SEQ ID NO: 940), hsa-miR-550b-3p (SEQ ID NO: 941), hsa-miR-606 (SEQ ID NO: 942), hsa-miR-421 (SEQ ID NO: 943), hsa-miR-519e-3p (SEQ ID NO: 944), hsa-miR-3180 (SEQ ID NO: 945), hsa-miR-151a-5p (SEQ ID NO: 946), hsa-miR-378g (SEQ ID NO: 947), hsa-miR-29a-5p (SEQ ID NO: 948), hsa-miR-6891-3p (SEQ ID NO: 949), hsa-miR-521 (SEQ ID NO: 950), hsa-miR-6894-3p (SEQ ID NO: 951), hsa-miR-518c-5p (SEQ ID NO: 952), hsa-miR-646 (SEQ ID NO: 953), hsa-miR-4788 (SEQ ID NO: 954), hsa-miR-590-5p (SEQ ID NO: 955), hsa-miR-1281 (SEQ ID NO: 956), hsa-miR-4483 (SEQ ID NO: 957), hsa-miR-5192 (SEQ ID NO: 958), hsa-miR-3657 (SEQ ID NO: 959), hsa-miR-148a-3p (SEQ ID NO: 960), hsa-miR-3151-5p (SEQ ID NO: 961), hsa-miR-4691-5p (SEQ ID NO: 962), hsa-miR-8054 (SEQ ID NO: 963), hsa-miR-412-5p (SEQ ID NO: 964), hsa-miR-4482-3p (SEQ ID NO: 965), hsa-miR-6851-3p (SEQ ID NO: 966), hsa-miR-6502-5p (SEQ ID NO: 967), hsa-miR-570-3p (SEQ ID NO: 968), hsa-miR-2113 (SEQ ID NO: 969), hsa-miR-6736-3p (SEQ ID NO: 970), hsa-miR-3135a (SEQ ID NO: 971), hsa-miR-4757-5p (SEQ ID NO: 972), hsa-miR-324-3p (SEQ ID NO: 973), hsa-miR-622 (SEQ ID NO: 974), hsa-miR-5571-3p (SEQ ID NO: 975), hsa-miR-581 (SEQ ID NO: 976), hsa-miR-7156-3p (SEQ ID NO: 977), hsa-miR-520g-3p (SEQ ID NO: 978), hsa-miR-1207-3p (SEQ ID NO: 979), hsa-miR-506-3p (SEQ ID NO: 980), hsa-miR-6811-5p (SEQ ID NO: 981), hsa-miR-6775-5p (SEQ ID NO: 982), hsa-miR-6748-5p (SEQ ID NO: 983), hsa-miR-1273 h-3p (SEQ ID NO: 984), hsa-miR-31-3p (SEQ ID NO: 985), hsa-miR-676-5p (SEQ ID NO: 986), hsa-miR-2115-3p (SEQ ID NO: 987), hsa-miR-7152-5p (SEQ ID NO: 988), hsa-miR-4460 (SEQ ID NO: 989), hsa-miR-5681a (SEQ ID NO: 990), hsa-miR-3974 (SEQ ID NO: 991), hsa-miR-6083 (SEQ ID NO: 992), hsa-miR-7156-5p (SEQ ID NO: 993), hsa-miR-6780a-5p (SEQ ID NO: 994), hsa-miR-6802-3p (SEQ ID NO: 995), hsa-miR-484 (SEQ ID NO: 996), hsa-miR-382-3p (SEQ ID NO: 997), hsa-miR-6770-5p (SEQ ID NO: 998), hsa-miR-4701-5p (SEQ ID NO: 999), hsa-miR-4752 (SEQ ID NO: 1000), hsa-miR-6848-5p (SEQ ID NO: 1001), hsa-miR-6724-5p (SEQ ID NO: 1002), hsa-miR-124-3p (SEQ ID NO: 1003), hsa-miR-3923 (SEQ ID NO: 1004), hsa-miR-4422 (SEQ ID NO: 1005), hsa-miR-96-3p (SEQ ID NO: 1006), hsa-miR-4441 (SEQ ID NO: 1007), hsa-miR-4535 (SEQ ID NO: 1008), hsa-miR-6831-3p (SEQ ID NO: 1009), hsa-miR-4676-5p (SEQ ID NO: 1010), hsa-miR-1324 (SEQ ID NO: 1011), hsa-miR-320d (SEQ ID NO: 1012), hsa-miR-526b-5p (SEQ ID NO: 1013), hsa-miR-3620-5p (SEQ ID NO: 1014), hsa-miR-3926 (SEQ ID NO: 1015), hsa-miR-95-3p (SEQ ID NO: 1016), hsa-miR-4688 (SEQ ID NO: 1017), hsa-miR-222-3p (SEQ ID NO: 1018), hsa-miR-617 (SEQ ID NO: 1019), hsa-miR-4285 (SEQ ID NO: 1020), hsa-miR-6865-3p (SEQ ID NO: 1021), hsa-miR-1178-3p (SEQ ID NO: 1022), hsa-miR-4796-5p (SEQ ID NO: 1023), hsa-miR-1297 (SEQ ID NO: 1024), hsa-miR-7852-3p (SEQ ID NO: 1025), hsa-miR-1208 (SEQ ID NO: 1026), hsa-miR-4522 (SEQ ID NO: 1027), hsa-miR-34c-3p (SEQ ID NO: 1028), hsa-miR-6784-3p (SEQ ID NO: 1029), hsa-miR-767-3p (SEQ ID NO: 1030), hsa-miR-6771-5p (SEQ ID NO: 1031), hsa-miR-6875-3p (SEQ ID NO: 1032), hsa-miR-1253 (SEQ ID NO: 1033), hsa-miR-4764-5p (SEQ ID NO: 1034), hsa-miR-6789-3p (SEQ ID NO: 1035), hsa-miR-134-3p (SEQ ID NO: 1036), hsa-miR-936 (SEQ ID NO: 1037), hsa-miR-921 (SEQ ID NO: 1038), hsa-miR-193a-3p (SEQ ID NO: 1039), hsa-miR-1185-5p (SEQ ID NO: 1040), hsa-miR-1199-5p (SEQ ID NO: 1041), hsa-miR-6847-5p (SEQ ID NO: 1042), hsa-miR-4655-3p (SEQ ID NO: 1043), hsa-miR-6833-3p (SEQ ID NO: 1044), hsa-miR-1277-3p (SEQ ID NO: 1045), hsa-miR-1538 (SEQ ID NO: 1046), hsa-miR-4776-3p (SEQ ID NO: 1047), hsa-miR-3116 (SEQ ID NO: 1048), hsa-miR-208a-3p (SEQ ID NO: 1049), hsa-miR-30c-2-3p (SEQ ID NO: 1050), hsa-miR-30e-3p (SEQ ID NO: 1051), hsa-miR-149-5p (SEQ ID NO: 1052), hsa-miR-4646-5p (SEQ ID NO: 1053), hsa-miR-3198 (SEQ ID NO: 1054), hsa-miR-9900 (SEQ ID NO: 1055), hsa-miR-221-3p (SEQ ID NO: 1056), hsa-miR-520f-5p (SEQ ID NO: 1057), hsa-miR-3139 (SEQ ID NO: 1058), hsa-miR-4999-5p (SEQ ID NO: 1059), hsa-miR-20b-3p (SEQ ID NO: 1060), hsa-miR-5188 (SEQ ID NO: 1061), hsa-miR-652-3p (SEQ ID NO: 1062), hsa-miR-4737 (SEQ ID NO: 1063), hsa-miR-4734 (SEQ ID NO: 1064), hsa-miR-1469 (SEQ ID NO: 1065), hsa-miR-4490 (SEQ ID NO: 1066), hsa-miR-4260 (SEQ ID NO: 1067), hsa-miR-2115-5p (SEQ ID NO: 1068), hsa-miR-633 (SEQ ID NO: 1069), hsa-miR-4662a-5p (SEQ ID NO: 1070), hsa-miR-5681b (SEQ ID NO: 1071), hsa-miR-6084 (SEQ ID NO: 1072), hsa-miR-4471 (SEQ ID NO: 1073), hsa-miR-585-5p (SEQ ID NO: 1074), hsa-miR-212-3p (SEQ ID NO: 1075), hsa-miR-10396b-5p (SEQ ID NO: 1076), hsa-miR-1224-5p (SEQ ID NO: 1077), hsa-miR-4772-5p (SEQ ID NO: 1078), hsa-miR-6764-3p (SEQ ID NO: 1079), hsa-miR-3158-3p (SEQ ID NO: 1080), hsa-miR-4427 (SEQ ID NO: 1081), hsa-miR-3913-5p (SEQ ID NO: 1082), hsa-miR-553 (SEQ ID NO: 1083), hsa-miR-6740-3p (SEQ ID NO: 1084), hsa-miR-568 (SEQ ID NO: 1085), hsa-miR-3714 (SEQ ID NO: 1086), hsa-miR-592 (SEQ ID NO: 1087), hsa-miR-6741-5p (SEQ ID NO: 1088), hsa-miR-3189-5p (SEQ ID NO: 1089), hsa-miR-3616-5p (SEQ ID NO: 1090), hsa-miR-9983-3p (SEQ ID NO: 1091), hsa-miR-6753-5p (SEQ ID NO: 1092), hsa-miR-520b-5p (SEQ ID NO: 1093), hsa-miR-940 (SEQ ID NO: 1094), hsa-miR-33b-3p (SEQ ID NO: 1095), hsa-miR-588 (SEQ ID NO: 1096), hsa-miR-4668-3p (SEQ ID NO: 1097), hsa-miR-1251-5p (SEQ ID NO: 1098), hsa-miR-8078 (SEQ ID NO: 1099), hsa-miR-5703 (SEQ ID NO: 1100), hsa-miR-146a-3p (SEQ ID NO: 1101), hsa-miR-449c-5p (SEQ ID NO: 1102), hsa-miR-5087 (SEQ ID NO: 1103), hsa-miR-6800-3p (SEQ ID NO: 1104), hsa-miR-11181-3p (SEQ ID NO: 1105), hsa-miR-3913-3p (SEQ ID NO: 1106), hsa-miR-6814-3p (SEQ ID NO: 1107), hsa-miR-1292-3p (SEQ ID NO: 1108), hsa-miR-6735-3p (SEQ ID NO: 1109), hsa-miR-548av-3p (SEQ ID NO: 1110), hsa-miR-5701 (SEQ ID NO: 1111), hsa-miR-450b-3p (SEQ ID NO: 1112), hsa-miR-3187-5p (SEQ ID NO: 1113), hsa-miR-4497 (SEQ ID NO: 1114), hsa-miR-7847-3p (SEQ ID NO: 1115), hsa-miR-6820-5p (SEQ ID NO: 1116), hsa-miR-1181 (SEQ ID NO: 1117), hsa-miR-3121-3p (SEQ ID NO: 1118), hsa-miR-8058 (SEQ ID NO: 1119), hsa-miR-452-5p (SEQ ID NO: 1120), hsa-miR-10397-5p (SEQ ID NO: 1121), hsa-miR-642a-5p (SEQ ID NO: 1122), hsa-miR-1204 (SEQ ID NO: 1123), hsa-miR-12125 (SEQ ID NO: 1124), hsa-miR-6753-3p (SEQ ID NO: 1125), hsa-miR-3156-5p (SEQ ID NO: 1126), hsa-miR-363-5p (SEQ ID NO: 1127), hsa-miR-7851-3p (SEQ ID NO: 1128), hsa-miR-3152-3p (SEQ ID NO: 1129), hsa-miR-607 (SEQ ID NO: 1130), hsa-miR-520c-5p (SEQ ID NO: 1131), hsa-miR-6783-5p (SEQ ID NO: 1132), hsa-miR-580-3p (SEQ ID NO: 1133), hsa-miR-4766-5p (SEQ ID NO: 1134), hsa-miR-4716-3p (SEQ ID NO: 1135), hsa-miR-6881-5p (SEQ ID NO: 1136), hsa-miR-25-5p (SEQ ID NO: 1137), hsa-miR-137-3p (SEQ ID NO: 1138), hsa-miR-3178 (SEQ ID NO: 1139), hsa-miR-548b-3p (SEQ ID NO: 1140), hsa-miR-11401 (SEQ ID NO: 1141), hsa-miR-4651 (SEQ ID NO: 1142), hsa-miR-4798-5p (SEQ ID NO: 1143), hsa-miR-148a-5p (SEQ ID NO: 1144), hsa-miR-4781-3p (SEQ ID NO: 1145), hsa-miR-4538 (SEQ ID NO: 1146), hsa-miR-4716-5p (SEQ ID NO: 1147), hsa-miR-6722-3p (SEQ ID NO: 1148), hsa-miR-3973 (SEQ ID NO: 1149), hsa-miR-99b-5p (SEQ ID NO: 1150), hsa-miR-548au-5p (SEQ ID NO: 1151), hsa-miR-494-3p (SEQ ID NO: 1152), hsa-miR-452-3p (SEQ ID NO: 1153), hsa-miR-19b-2-5p (SEQ ID NO: 1154), hsa-miR-221-5p (SEQ ID NO: 1155), hsa-miR-4322 (SEQ ID NO: 1156), hsa-miR-6780a-3p (SEQ ID NO: 1157), hsa-miR-4329 (SEQ ID NO: 1158), hsa-miR-548at-3p (SEQ ID NO: 1159), hsa-miR-4704-3p (SEQ ID NO: 1160), hsa-miR-3664-3p (SEQ ID NO: 1161), hsa-miR-551a (SEQ ID NO: 1162), hsa-miR-4648 (SEQ ID NO: 1163), hsa-let-7f-2-3p (SEQ ID NO: 1164), hsa-miR-4749-5p (SEQ ID NO: 1165), hsa-miR-7844-5p (SEQ ID NO: 1166), hsa-miR-3167 (SEQ ID NO: 1167), hsa-miR-1295b-5p (SEQ ID NO: 1168), hsa-miR-891a-3p (SEQ ID NO: 1169), hsa-miR-215-5p (SEQ ID NO: 1170), hsa-miR-1292-5p (SEQ ID NO: 1171), hsa-miR-4670-3p (SEQ ID NO: 1172), hsa-miR-605-5p (SEQ ID NO: 1173), hsa-miR-12119 (SEQ ID NO: 1174), hsa-miR-6806-3p (SEQ ID NO: 1175), hsa-miR-4720-5p (SEQ ID NO: 1176), hsa-miR-5684 (SEQ ID NO: 1177), hsa-miR-6758-3p (SEQ ID NO: 1178), hsa-miR-150-5p (SEQ ID NO: 1179), hsa-miR-361-3p (SEQ ID NO: 1180), hsa-miR-4446-3p (SEQ ID NO: 1181), hsa-miR-6133 (SEQ ID NO: 1182), hsa-miR-4281 (SEQ ID NO: 1183), hsa-miR-628-5p (SEQ ID NO: 1184), hsa-miR-100-3p (SEQ ID NO: 1185), hsa-miR-3133 (SEQ ID NO: 1186), hsa-miR-4298 (SEQ ID NO: 1187), hsa-miR-6759-5p (SEQ ID NO: 1188), hsa-miR-6777-3p (SEQ ID NO: 1189), hsa-miR-323a-5p (SEQ ID NO: 1190), hsa-miR-345-5p (SEQ ID NO: 1191), hsa-miR-877-5p (SEQ ID NO: 1192), hsa-miR-5008-5p (SEQ ID NO: 1193), hsa-miR-27b-5p (SEQ ID NO: 1194), hsa-miR-301b-3p (SEQ ID NO: 1195), hsa-miR-5000-3p (SEQ ID NO: 1196), hsa-miR-4776-5p (SEQ ID NO: 1197), hsa-miR-1227-3p (SEQ ID NO: 1198), hsa-miR-659-3p (SEQ ID NO: 1199), hsa-miR-92a-2-5p (SEQ ID NO: 1200), hsa-miR-1256 (SEQ ID NO: 1201), hsa-miR-6813-5p (SEQ ID NO: 1202), hsa-miR-105-5p (SEQ ID NO: 1203), hsa-miR-4755-3p (SEQ ID NO: 1204), hsa-miR-640 (SEQ ID NO: 1205), hsa-miR-199a-3p (SEQ ID NO: 1206), hsa-miR-1224-3p (SEQ ID NO: 1207), hsa-miR-12129 (SEQ ID NO: 1208), hsa-miR-30d-3p (SEQ ID NO: 1209), hsa-miR-1307-5p (SEQ ID NO: 1210), hsa-miR-32-3p (SEQ ID NO: 1211), hsa-miR-4500 (SEQ ID NO: 1212), hsa-miR-525-3p (SEQ ID NO: 1213), hsa-miR-708-5p (SEQ ID NO: 1214), hsa-miR-4273 (SEQ ID NO: 1215), hsa-miR-488-3p (SEQ ID NO: 1216), hsa-miR-4466 (SEQ ID NO: 1217), hsa-miR-2467-3p (SEQ ID NO: 1218), hsa-miR-6764-5p (SEQ ID NO: 1219), hsa-miR-548y (SEQ ID NO: 1220), hsa-miR-3928-5p (SEQ ID NO: 1221), hsa-miR-3914 (SEQ ID NO: 1222), hsa-miR-34a-5p (SEQ ID NO: 1223), hsa-miR-711 (SEQ ID NO: 1224), hsa-miR-335-5p (SEQ ID NO: 1225), hsa-miR-5588-3p (SEQ ID NO: 1226), hsa-miR-6769a-5p (SEQ ID NO: 1227), hsa-miR-99b-3p (SEQ ID NO: 1228), hsa-miR-5091 (SEQ ID NO: 1229), hsa-miR-6848-3p (SEQ ID NO: 1230), hsa-miR-26a-5p (SEQ ID NO: 1231), hsa-miR-4793-5p (SEQ ID NO: 1232), hsa-miR-6819-5p (SEQ ID NO: 1233), hsa-miR-6747-3p (SEQ ID NO: 1234), hsa-miR-190a-5p (SEQ ID NO: 1235), hsa-miR-6728-3p (SEQ ID NO: 1236), hsa-miR-7109-5p (SEQ ID NO: 1237), hsa-miR-3674 (SEQ ID NO: 1238), hsa-miR-4647 (SEQ ID NO: 1239), hsa-miR-3165 (SEQ ID NO: 1240), hsa-miR-548c-3p (SEQ ID NO: 1241), hsa-miR-4308 (SEQ ID NO: 1242), hsa-miR-6731-5p (SEQ ID NO: 1243), hsa-miR-3130-3p (SEQ ID NO: 1244), hsa-miR-3666 (SEQ ID NO: 1245), hsa-miR-122b-5p (SEQ ID NO: 1246), hsa-miR-4639-5p (SEQ ID NO: 1247), hsa-miR-297 (SEQ ID NO: 1248), hsa-miR-1264 (SEQ ID NO: 1249), hsa-miR-5583-3p (SEQ ID NO: 1250), hsa-miR-3188 (SEQ ID NO: 1251), hsa-let-7a-5p (SEQ ID NO: 1252), hsa-miR-6080 (SEQ ID NO: 1253), hsa-miR-7-5p (SEQ ID NO: 1254), hsa-miR-3136-5p (SEQ ID NO: 1255), hsa-miR-499a-3p (SEQ ID NO: 1256), hsa-miR-629-3p (SEQ ID NO: 1257), hsa-miR-4771 (SEQ ID NO: 1258), hsa-miR-518d-3p (SEQ ID NO: 1259), hsa-miR-6815-5p (SEQ ID NO: 1260), hsa-miR-6746-5p (SEQ ID NO: 1261), hsa-miR-6772-3p (SEQ ID NO: 1262), hsa-miR-874-3p (SEQ ID NO: 1263), hsa-miR-130a-5p (SEQ ID NO: 1264), hsa-miR-331-3p (SEQ ID NO: 1265), hsa-miR-187-3p (SEQ ID NO: 1266), hsa-miR-3150a-3p (SEQ ID NO: 1267), hsa-miR-4433b-3p (SEQ ID NO: 1268), hsa-miR-924 (SEQ ID NO: 1269), hsa-miR-523-3p (SEQ ID NO: 1270), hsa-miR-579-3p (SEQ ID NO: 1271), hsa-miR-577 (SEQ ID NO: 1272), hsa-miR-382-5p (SEQ ID NO: 1273), hsa-miR-4770 (SEQ ID NO: 1274), hsa-miR-8083 (SEQ ID NO: 1275), hsa-miR-218-1-3p (SEQ ID NO: 1276), hsa-miR-3115 (SEQ ID NO: 1277), hsa-miR-6877-3p (SEQ ID NO: 1278), hsa-miR-4746-5p (SEQ ID NO: 1279), hsa-miR-5010-3p (SEQ ID NO: 1280), hsa-miR-376a-5p (SEQ ID NO: 1281), hsa-miR-188-5p (SEQ ID NO: 1282), hsa-miR-7978 (SEQ ID NO: 1283), hsa-miR-495-3p (SEQ ID NO: 1284), hsa-miR-4507 (SEQ ID NO: 1285), hsa-miR-4293 (SEQ ID NO: 1286), hsa-miR-4516 (SEQ ID NO: 1287), hsa-miR-4475 (SEQ ID NO: 1288), hsa-miR-1910-3p (SEQ ID NO: 1289), hsa-miR-4681 (SEQ ID NO: 1290), hsa-miR-152-5p (SEQ ID NO: 1291), hsa-miR-409-3p (SEQ ID NO: 1292), hsa-miR-204-5p (SEQ ID NO: 1293), hsa-miR-1249-3p (SEQ ID NO: 1294), hsa-miR-4787-3p (SEQ ID NO: 1295), hsa-miR-6071 (SEQ ID NO: 1296), hsa-miR-3920 (SEQ ID NO: 1297), hsa-miR-548az-3p (SEQ ID NO: 1298), hsa-miR-6879-5p (SEQ ID NO: 1299), hsa-miR-183-5p (SEQ ID NO: 1300), hsa-miR-6878-3p (SEQ ID NO: 1301), hsa-miR-544a (SEQ ID NO: 1302), hsa-miR-135b-3p (SEQ ID NO: 1303), hsa-miR-7973 (SEQ ID NO: 1304), hsa-miR-548ai (SEQ ID NO: 1305), hsa-miR-501-3p (SEQ ID NO: 1306), hsa-miR-4695-5p (SEQ ID NO: 1307), hsa-miR-1251-3p (SEQ ID NO: 1308), hsa-miR-548ao-5p (SEQ ID NO: 1309), hsa-miR-4692 (SEQ ID NO: 1310), hsa-miR-103b (SEQ ID NO: 1311), hsa-miR-3665 (SEQ ID NO: 1312), hsa-miR-524-3p (SEQ ID NO: 1313), hsa-miR-214-3p (SEQ ID NO: 1314), hsa-miR-1197 (SEQ ID NO: 1315), hsa-miR-3141 (SEQ ID NO: 1316), hsa-miR-346 (SEQ ID NO: 1317), hsa-miR-21-5p (SEQ ID NO: 1318), hsa-miR-6885-3p (SEQ ID NO: 1319), hsa-miR-197-3p (SEQ ID NO: 1320), hsa-miR-12113 (SEQ ID NO: 1321), hsa-miR-4786-5p (SEQ ID NO: 1322), hsa-miR-205-3p (SEQ ID NO: 1323), hsa-miR-5582-3p (SEQ ID NO: 1324), hsa-miR-4485-5p (SEQ ID NO: 1325), hsa-miR-513c-5p (SEQ ID NO: 1326), hsa-miR-8066 (SEQ ID NO: 1327), hsa-miR-145-5p (SEQ ID NO: 1328), hsa-miR-5693 (SEQ ID NO: 1329), hsa-miR-4780 (SEQ ID NO: 1330), hsa-miR-4801 (SEQ ID NO: 1331), hsa-miR-602 (SEQ ID NO: 1332), hsa-miR-3935 (SEQ ID NO: 1333), hsa-miR-2355-5p (SEQ ID NO: 1334), hsa-miR-4252 (SEQ ID NO: 1335), hsa-miR-8065 (SEQ ID NO: 1336), hsa-miR-668-5p (SEQ ID NO: 1337), hsa-miR-4768-3p (SEQ ID NO: 1338), hsa-miR-552-5p (SEQ ID NO: 1339), hsa-miR-5582-5p (SEQ ID NO: 1340), hsa-miR-6124 (SEQ ID NO: 1341), hsa-miR-4453 (SEQ ID NO: 1342), hsa-miR-3689b-3p (SEQ ID NO: 1343), hsa-miR-10401-5p (SEQ ID NO: 1344), hsa-miR-433-3p (SEQ ID NO: 1345), hsa-miR-187-5p (SEQ ID NO: 1346), hsa-miR-613 (SEQ ID NO: 1347), hsa-miR-1293 (SEQ ID NO: 1348), hsa-miR-6830-5p (SEQ ID NO: 1349), hsa-miR-1225-3p (SEQ ID NO: 1350), hsa-miR-4749-3p (SEQ ID NO: 1351), hsa-miR-4643 (SEQ ID NO: 1352), hsa-miR-210-3p (SEQ ID NO: 1353), hsa-miR-302d-3p (SEQ ID NO: 1354), hsa-miR-6850-3p (SEQ ID NO: 1355), hsa-miR-6762-5p (SEQ ID NO: 1356), hsa-miR-3177-3p (SEQ ID NO: 1357), hsa-miR-4687-5p (SEQ ID NO: 1358), hsa-miR-2682-5p (SEQ ID NO: 1359), hsa-miR-520f-3p (SEQ ID NO: 1360), hsa-miR-656-5p (SEQ ID NO: 1361), hsa-miR-5197-3p (SEQ ID NO: 1362), hsa-miR-487a-3p (SEQ ID NO: 1363), hsa-miR-30d-5p (SEQ ID NO: 1364), hsa-miR-548av-5p (SEQ ID NO: 1365), hsa-miR-6827-3p (SEQ ID NO: 1366), hsa-miR-518d-5p (SEQ ID NO: 1367), hsa-miR-4740-5p (SEQ ID NO: 1368), hsa-miR-637 (SEQ ID NO: 1369), hsa-miR-7108-5p (SEQ ID NO: 1370), hsa-miR-6887-5p (SEQ ID NO: 1371), hsa-miR-3690 (SEQ ID NO: 1372), hsa-miR-34b-5p (SEQ ID NO: 1373), hsa-miR-6786-3p (SEQ ID NO: 1374), hsa-miR-518a-3p (SEQ ID NO: 1375), hsa-miR-3975 (SEQ ID NO: 1376), hsa-miR-645 (SEQ ID NO: 1377), hsa-miR-4524b-3p (SEQ ID NO: 1378), hsa-miR-17-5p (SEQ ID NO: 1379), hsa-miR-6895-3p (SEQ ID NO: 1380), hsa-miR-6873-5p (SEQ ID NO: 1381), hsa-miR-4674 (SEQ ID NO: 1382), hsa-miR-3200-5p (SEQ ID NO: 1383), hsa-miR-2909 (SEQ ID NO: 1384), hsa-miR-4730 (SEQ ID NO: 1385), hsa-miR-3681-5p (SEQ ID NO: 1386), hsa-miR-6876-5p (SEQ ID NO: 1387), hsa-miR-302b-3p (SEQ ID NO: 1388), hsa-miR-92b-3p (SEQ ID NO: 1389), hsa-miR-3140-5p (SEQ ID NO: 1390), hsa-miR-3680-5p (SEQ ID NO: 1391), hsa-miR-8069 (SEQ ID NO: 1392), hsa-miR-526a-3p (SEQ ID NO: 1393), hsa-miR-6506-3p (SEQ ID NO: 1394), hsa-miR-3187-3p (SEQ ID NO: 1395), hsa-miR-758-5p (SEQ ID NO: 1396), hsa-miR-5089-3p (SEQ ID NO: 1397), hsa-miR-3977 (SEQ ID NO: 1398), hsa-miR-5682 (SEQ ID NO: 1399), hsa-miR-4695-3p (SEQ ID NO: 1400), hsa-miR-377-5p (SEQ ID NO: 1401), hsa-miR-562 (SEQ ID NO: 1402), hsa-miR-4328 (SEQ ID NO: 1403), hsa-miR-202-3p (SEQ ID NO: 1404), hsa-miR-5196-3p (SEQ ID NO: 1405), hsa-miR-4314 (SEQ ID NO: 1406), hsa-miR-3681-3p (SEQ ID NO: 1407), hsa-miR-2114-3p (SEQ ID NO: 1408), hsa-miR-5692a (SEQ ID NO: 1409), hsa-miR-615-5p (SEQ ID NO: 1410), hsa-miR-3677-3p (SEQ ID NO: 1411), hsa-miR-138-1-3p (SEQ ID NO: 1412), hsa-miR-4641 (SEQ ID NO: 1413), hsa-miR-370-5p (SEQ ID NO: 1414), hsa-miR-4732-5p (SEQ ID NO: 1415), hsa-miR-6760-3p (SEQ ID NO: 1416), hsa-miR-7162-5p (SEQ ID NO: 1417), hsa-miR-8060 (SEQ ID NO: 1418), hsa-miR-1237-5p (SEQ ID NO: 1419), hsa-miR-4421 (SEQ ID NO: 1420), hsa-miR-3195 (SEQ ID NO: 1421), hsa-miR-193a-5p (SEQ ID NO: 1422), hsa-miR-4486 (SEQ ID NO: 1423), hsa-miR-4534 (SEQ ID NO: 1424), hsa-miR-2278 (SEQ ID NO: 1425), hsa-miR-892c-5p (SEQ ID NO: 1426), hsa-miR-1179 (SEQ ID NO: 1427), hsa-miR-6834-3p (SEQ ID NO: 1428), hsa-miR-380-5p (SEQ ID NO: 1429), hsa-miR-19b-1-5p (SEQ ID NO: 1430), hsa-miR-6759-3p (SEQ ID NO: 1431), hsa-miR-500a-5p (SEQ ID NO: 1432), hsa-miR-744-5p (SEQ ID NO: 1433), hsa-miR-26a-2-3p (SEQ ID NO: 1434), hsa-miR-3605-3p (SEQ ID NO: 1435), hsa-miR-4677-3p (SEQ ID NO: 1436), hsa-miR-34a-3p (SEQ ID NO: 1437), hsa-miR-3122 (SEQ ID NO: 1438), hsa-miR-758-3p (SEQ ID NO: 1439), hsa-miR-4274 (SEQ ID NO: 1440), hsa-miR-6732-5p (SEQ ID NO: 1441), hsa-miR-598-5p (SEQ ID NO: 1442), hsa-miR-4465 (SEQ ID NO: 1443), hsa-miR-548ar-3p (SEQ ID NO: 1444), hsa-miR-4690-3p (SEQ ID NO: 1445), hsa-miR-202-5p (SEQ ID NO: 1446), hsa-miR-378d (SEQ ID NO: 1447), hsa-miR-6765-5p (SEQ ID NO: 1448), hsa-miR-6511a-5p (SEQ ID NO: 1449), hsa-miR-1267 (SEQ ID NO: 1450), hsa-miR-4668-5p (SEQ ID NO: 1451), hsa-miR-6730-3p (SEQ ID NO: 1452), hsa-miR-4671-5p (SEQ ID NO: 1453), hsa-miR-920 (SEQ ID NO: 1454), hsa-miR-6826-5p (SEQ ID NO: 1455), hsa-miR-5092 (SEQ ID NO: 1456), hsa-miR-548b-5p (SEQ ID NO: 1457), hsa-miR-135a-3p (SEQ ID NO: 1458), hsa-miR-516a-3p (SEQ ID NO: 1459), hsa-miR-4513 (SEQ ID NO: 1460), hsa-miR-518e-5p (SEQ ID NO: 1461), hsa-miR-205-5p (SEQ ID NO: 1462), hsa-miR-593-3p (SEQ ID NO: 1463), hsa-miR-6836-5p (SEQ ID NO: 1464), hsa-miR-6515-5p (SEQ ID NO: 1465), hsa-miR-653-5p (SEQ ID NO: 1466), hsa-miR-6503-5p (SEQ ID NO: 1467), hsa-miR-6504-5p (SEQ ID NO: 1468), hsa-miR-627-5p (SEQ ID NO: 1469), hsa-miR-3618 (SEQ ID NO: 1470), hsa-miR-5186 (SEQ ID NO: 1471), hsa-miR-513a-3p (SEQ ID NO: 1472), hsa-miR-10392-3p (SEQ ID NO: 1473), hsa-miR-210-5p (SEQ ID NO: 1474), hsa-miR-5196-5p (SEQ ID NO: 1475), hsa-miR-4708-3p (SEQ ID NO: 1476), hsa-miR-6078 (SEQ ID NO: 1477), hsa-miR-3173-5p (SEQ ID NO: 1478), hsa-miR-4748 (SEQ ID NO: 1479), hsa-miR-4302 (SEQ ID NO: 1480), hsa-miR-4735-3p (SEQ ID NO: 1481), hsa-miR-223-3p (SEQ ID NO: 1482), hsa-miR-142-5p (SEQ ID NO: 1483), hsa-miR-6803-3p (SEQ ID NO: 1484), hsa-miR-6511a-3p (SEQ ID NO: 1485), hsa-miR-5583-5p (SEQ ID NO: 1486), hsa-miR-507 (SEQ ID NO: 1487), hsa-miR-3171 (SEQ ID NO: 1488), hsa-miR-3908 (SEQ ID NO: 1489), hsa-miR-4761-5p (SEQ ID NO: 1490), hsa-miR-8053 (SEQ ID NO: 1491), hsa-miR-186-3p (SEQ ID NO: 1492), hsa-miR-3689d (SEQ ID NO: 1493), hsa-miR-6769b-3p (SEQ ID NO: 1494), hsa-miR-12115 (SEQ ID NO: 1495), hsa-miR-7106-3p (SEQ ID NO: 1496), hsa-miR-10a-3p (SEQ ID NO: 1497), hsa-miR-6815-3p (SEQ ID NO: 1498), hsa-miR-6088 (SEQ ID NO: 1499), hsa-miR-1-3p (SEQ ID NO: 1500), hsa-miR-200a-5p (SEQ ID NO: 1501), hsa-miR-3202 (SEQ ID NO: 1502), hsa-miR-943 (SEQ ID NO: 1503), hsa-miR-6833-5p (SEQ ID NO: 1504), hsa-miR-6883-5p (SEQ ID NO: 1505), hsa-miR-6890-3p (SEQ ID NO: 1506), hsa-miR-3149 (SEQ ID NO: 1507), hsa-let-7b-3p (SEQ ID NO: 1508), hsa-miR-6878-5p (SEQ ID NO: 1509), hsa-miR-146b-3p (SEQ ID NO: 1510), hsa-miR-10399-3p (SEQ ID NO: 1511), hsa-miR-4731-5p (SEQ ID NO: 1512), hsa-let-7g-3p (SEQ ID NO: 1513), hsa-miR-5590-5p (SEQ ID NO: 1514), hsa-miR-551b-5p (SEQ ID NO: 1515), hsa-miR-3186-3p (SEQ ID NO: 1516), hsa-miR-302a-5p (SEQ ID NO: 1517), hsa-miR-769-5p (SEQ ID NO: 1518), hsa-miR-19a-3p (SEQ ID NO: 1519), hsa-miR-381-5p (SEQ ID NO: 1520), hsa-miR-6741-3p (SEQ ID NO: 1521), hsa-miR-6845-5p (SEQ ID NO: 1522), hsa-miR-7155-5p (SEQ ID NO: 1523), hsa-miR-544b (SEQ ID NO: 1524), hsa-miR-4505 (SEQ ID NO: 1525), hsa-miR-8073 (SEQ ID NO: 1526), hsa-miR-4633-3p (SEQ ID NO: 1527), hsa-miR-4694-5p (SEQ ID NO: 1528), hsa-miR-3677-5p (SEQ ID NO: 1529), hsa-miR-4491 (SEQ ID NO: 1530), hsa-miR-7848-3p (SEQ ID NO: 1531), hsa-miR-668-3p (SEQ ID NO: 1532), hsa-miR-938 (SEQ ID NO: 1533), hsa-miR-3074-3p (SEQ ID NO: 1534), hsa-miR-6716-3p (SEQ ID NO: 1535), hsa-miR-342-3p (SEQ ID NO: 1536), hsa-miR-5587-5p (SEQ ID NO: 1537), hsa-miR-584-5p (SEQ ID NO: 1538), hsa-miR-298 (SEQ ID NO: 1539), hsa-miR-8055 (SEQ ID NO: 1540), hsa-miR-3612 (SEQ ID NO: 1541), hsa-miR-542-5p (SEQ ID NO: 1542), hsa-miR-19b-3p (SEQ ID NO: 1543), hsa-miR-1231 (SEQ ID NO: 1544), hsa-miR-4255 (SEQ ID NO: 1545), hsa-miR-10396a-3p (SEQ ID NO: 1546), hsa-miR-675-5p (SEQ ID NO: 1547), hsa-miR-199a-5p (SEQ ID NO: 1548), hsa-miR-513b-5p (SEQ ID NO: 1549), hsa-miR-4455 (SEQ ID NO: 1550), hsa-miR-3682-3p (SEQ ID NO: 1551), hsa-miR-9500 (SEQ ID NO: 1552), hsa-miR-6828-5p (SEQ ID NO: 1553), hsa-miR-6718-5p (SEQ ID NO: 1554), hsa-miR-939-3p (SEQ ID NO: 1555), hsa-miR-548ad-5p (SEQ ID NO: 1556), hsa-miR-339-3p (SEQ ID NO: 1557), hsa-miR-4739 (SEQ ID NO: 1558), hsa-miR-630 (SEQ ID NO: 1559), hsa-miR-1246 (SEQ ID NO: 1560), hsa-miR-3135b (SEQ ID NO: 1561), hsa-miR-600 (SEQ ID NO: 1562), hsa-miR-129-1-3p (SEQ ID NO: 1563), hsa-miR-4268 (SEQ ID NO: 1564), hsa-miR-876-5p (SEQ ID NO: 1565), hsa-miR-3145-5p (SEQ ID NO: 1566), hsa-miR-12122 (SEQ ID NO: 1567), hsa-miR-582-5p (SEQ ID NO: 1568), hsa-miR-3085-3p (SEQ ID NO: 1569), hsa-miR-1470 (SEQ ID NO: 1570), hsa-miR-4291 (SEQ ID NO: 1571), hsa-miR-766-5p (SEQ ID NO: 1572), hsa-miR-548ae-5p (SEQ ID NO: 1573), hsa-miR-1271-3p (SEQ ID NO: 1574), hsa-miR-200c-3p (SEQ ID NO: 1575), hsa-miR-4721 (SEQ ID NO: 1576), hsa-miR-6810-5p (SEQ ID NO: 1577), hsa-miR-6853-5p (SEQ ID NO: 1578), hsa-miR-4744 (SEQ ID NO: 1579), hsa-miR-3670 (SEQ ID NO: 1580), hsa-miR-3925-3p (SEQ ID NO: 1581), hsa-miR-17-3p (SEQ ID NO: 1582), hsa-miR-5585-5p (SEQ ID NO: 1583), hsa-miR-4652-3p (SEQ ID NO: 1584), hsa-miR-196b-3p (SEQ ID NO: 1585), hsa-miR-10523-5p (SEQ ID NO: 1586), hsa-miR-3200-3p (SEQ ID NO: 1587), hsa-miR-196a-3p (SEQ ID NO: 1588), hsa-miR-320e (SEQ ID NO: 1589), hsa-miR-4804-3p (SEQ ID NO: 1590), hsa-miR-4433a-5p (SEQ ID NO: 1591), hsa-miR-3689a-3p (SEQ ID NO: 1592), hsa-miR-548ba (SEQ ID NO: 1593), hsa-miR-548d-3p (SEQ ID NO: 1594), hsa-miR-10393-3p (SEQ ID NO: 1595), hsa-miR-8080 (SEQ ID NO: 1596), hsa-miR-4316 (SEQ ID NO: 1597), hsa-miR-548az-5p (SEQ ID NO: 1598), hsa-miR-4717-5p (SEQ ID NO: 1599), hsa-miR-10400-3p (SEQ ID NO: 1600), hsa-miR-4690-5p (SEQ ID NO: 1601), hsa-miR-3678-3p (SEQ ID NO: 1602), hsa-miR-3194-5p (SEQ ID NO: 1603), hsa-miR-605-3p (SEQ ID NO: 1604), hsa-miR-4706 (SEQ ID NO: 1605), hsa-miR-4725-3p (SEQ ID NO: 1606), hsa-miR-4432 (SEQ ID NO: 1607), hsa-miR-7849-3p (SEQ ID NO: 1608), hsa-miR-503-3p (SEQ ID NO: 1609), hsa-miR-1307-3p (SEQ ID NO: 1610), hsa-miR-6731-3p (SEQ ID NO: 1611), hsa-miR-376a-3p (SEQ ID NO: 1612), hsa-miR-6859-3p (SEQ ID NO: 1613), hsa-miR-5000-5p (SEQ ID NO: 1614), hsa-miR-3065-5p (SEQ ID NO: 1615), hsa-miR-6822-3p (SEQ ID NO: 1616), hsa-miR-8086 (SEQ ID NO: 1617), hsa-miR-217-3p (SEQ ID NO: 1618), hsa-miR-125b-2-3p (SEQ ID NO: 1619), hsa-miR-548am-5p (SEQ ID NO: 1620), hsa-miR-323b-3p (SEQ ID NO: 1621), hsa-miR-4489 (SEQ ID NO: 1622), hsa-miR-6862-3p (SEQ ID NO: 1623), hsa-miR-194-3p (SEQ ID NO: 1624), hsa-miR-6772-5p (SEQ ID NO: 1625), hsa-miR-223-5p (SEQ ID NO: 1626), hsa-miR-569 (SEQ ID NO: 1627), hsa-miR-520b-3p (SEQ ID NO: 1628), hsa-miR-4680-5p (SEQ ID NO: 1629), hsa-miR-1914-3p (SEQ ID NO: 1630), hsa-miR-4740-3p (SEQ ID NO: 1631), hsa-miR-518b (SEQ ID NO: 1632), hsa-miR-504-3p (SEQ ID NO: 1633), hsa-miR-149-3p (SEQ ID NO: 1634), hsa-miR-4758-5p (SEQ ID NO: 1635), hsa-miR-26b-5p (SEQ ID NO: 1636), hsa-miR-5708 (SEQ ID NO: 1637), hsa-miR-1236-3p (SEQ ID NO: 1638), hsa-miR-670-3p (SEQ ID NO: 1639), hsa-miR-573 (SEQ ID NO: 1640), hsa-miR-3912-5p (SEQ ID NO: 1641), hsa-miR-12130 (SEQ ID NO: 1642), hsa-miR-4783-5p (SEQ ID NO: 1643), hsa-miR-3686 (SEQ ID NO: 1644), hsa-miR-660-3p (SEQ ID NO: 1645), hsa-miR-3655 (SEQ ID NO: 1646), hsa-miR-4720-3p (SEQ ID NO: 1647), hsa-miR-3160-5p (SEQ ID NO: 1648), hsa-miR-1202 (SEQ ID NO: 1649), hsa-miR-765 (SEQ ID NO: 1650), hsa-miR-628-3p (SEQ ID NO: 1651), hsa-miR-12135 (SEQ ID NO: 1652), hsa-miR-532-5p (SEQ ID NO: 1653), hsa-miR-3131 (SEQ ID NO: 1654), hsa-miR-296-5p (SEQ ID NO: 1655), hsa-miR-378a-5p (SEQ ID NO: 1656), hsa-miR-6769a-3p (SEQ ID NO: 1657), hsa-miR-6802-5p (SEQ ID NO: 1658), hsa-miR-1911-5p (SEQ ID NO: 1659), hsa-miR-20a-5p (SEQ ID NO: 1660), hsa-miR-6128 (SEQ ID NO: 1661), hsa-miR-5586-5p (SEQ ID NO: 1662), hsa-miR-4790-5p (SEQ ID NO: 1663), hsa-miR-188-3p (SEQ ID NO: 1664), hsa-miR-4654 (SEQ ID NO: 1665), hsa-miR-21-3p (SEQ ID NO: 1666), hsa-miR-6859-5p (SEQ ID NO: 1667), hsa-miR-550b-2-5p (SEQ ID NO: 1668), hsa-miR-4527 (SEQ ID NO: 1669), hsa-miR-6782-5p (SEQ ID NO: 1670), hsa-miR-2355-3p (SEQ ID NO: 1671), hsa-miR-2117 (SEQ ID NO: 1672), hsa-miR-148b-3p (SEQ ID NO: 1673), hsa-miR-6864-3p (SEQ ID NO: 1674), hsa-miR-590-3p (SEQ ID NO: 1675), hsa-miR-5589-5p (SEQ ID NO: 1676), hsa-miR-100-5p (SEQ ID NO: 1677), hsa-miR-548u (SEQ ID NO: 1678), hsa-miR-6837-3p (SEQ ID NO: 1679), hsa-miR-6774-5p (SEQ ID NO: 1680), hsa-miR-4263 (SEQ ID NO: 1681), hsa-miR-320a-3p (SEQ ID NO: 1682), hsa-miR-8074 (SEQ ID NO: 1683), hsa-miR-4666a-5p (SEQ ID NO: 1684), hsa-miR-6808-3p (SEQ ID NO: 1685), hsa-miR-6743-3p (SEQ ID NO: 1686), hsa-miR-511-5p (SEQ ID NO: 1687), hsa-miR-4632-5p (SEQ ID NO: 1688), hsa-miR-301a-3p (SEQ ID NO: 1689), hsa-miR-1200 (SEQ ID NO: 1690), hsa-miR-3199 (SEQ ID NO: 1691), hsa-miR-152-3p (SEQ ID NO: 1692), hsa-miR-361-5p (SEQ ID NO: 1693), hsa-miR-1199-3p (SEQ ID NO: 1694), hsa-miR-6751-3p (SEQ ID NO: 1695), hsa-miR-6757-3p (SEQ ID NO: 1696), hsa-miR-6871-5p (SEQ ID NO: 1697), hsa-miR-656-3p (SEQ ID NO: 1698), hsa-miR-4728-5p (SEQ ID NO: 1699), hsa-miR-23c (SEQ ID NO: 1700), hsa-miR-4717-3p (SEQ ID NO: 1701), hsa-miR-517c-3p (SEQ ID NO: 1702), hsa-miR-520c-3p (SEQ ID NO: 1703), hsa-miR-6854-5p (SEQ ID NO: 1704), hsa-miR-4310 (SEQ ID NO: 1705), hsa-miR-6849-3p (SEQ ID NO: 1706), hsa-miR-5591-5p (SEQ ID NO: 1707), hsa-miR-4277 (SEQ ID NO: 1708), hsa-miR-509-3p (SEQ ID NO: 1709), hsa-miR-4722-3p (SEQ ID NO: 1710), hsa-miR-6729-5p (SEQ ID NO: 1711), hsa-miR-4496 (SEQ ID NO: 1712), hsa-miR-4764-3p (SEQ ID NO: 1713), hsa-miR-4782-5p (SEQ ID NO: 1714), hsa-miR-1323 (SEQ ID NO: 1715), hsa-miR-708-3p (SEQ ID NO: 1716), hsa-let-7i-5p (SEQ ID NO: 1717), hsa-miR-384 (SEQ ID NO: 1718), hsa-miR-4292 (SEQ ID NO: 1719), hsa-miR-4699-3p (SEQ ID NO: 1720), hsa-miR-1252-5p (SEQ ID NO: 1721), hsa-miR-500b-3p (SEQ ID NO: 1722), hsa-miR-4802-5p (SEQ ID NO: 1723), hsa-miR-4509 (SEQ ID NO: 1724), hsa-miR-6090 (SEQ ID NO: 1725), hsa-miR-654-3p (SEQ ID NO: 1726), hsa-miR-4679 (SEQ ID NO: 1727), hsa-miR-429 (SEQ ID NO: 1728), hsa-miR-584-3p (SEQ ID NO: 1729), hsa-miR-4655-5p (SEQ ID NO: 1730), hsa-miR-508-3p (SEQ ID NO: 1731), hsa-miR-4762-5p (SEQ ID NO: 1732), hsa-miR-6808-5p (SEQ ID NO: 1733), hsa-miR-6837-5p (SEQ ID NO: 1734), hsa-miR-200b-5p (SEQ ID NO: 1735), hsa-miR-6801-3p (SEQ ID NO: 1736), hsa-miR-548d-5p (SEQ ID NO: 1737), hsa-miR-3157-3p (SEQ ID NO: 1738), hsa-miR-3059-5p (SEQ ID NO: 1739), hsa-miR-324-5p (SEQ ID NO: 1740), hsa-miR-3713 (SEQ ID NO: 1741), hsa-miR-4280 (SEQ ID NO: 1742), hsa-miR-26a-1-3p (SEQ ID NO: 1743), hsa-miR-6743-5p (SEQ ID NO: 1744), hsa-miR-6855-5p (SEQ ID NO: 1745), hsa-miR-1294 (SEQ ID NO: 1746), hsa-miR-5696 (SEQ ID NO: 1747), hsa-miR-548aa (SEQ ID NO: 1748), hsa-miR-7158-5p (SEQ ID NO: 1749), hsa-miR-3157-5p (SEQ ID NO: 1750), hsa-miR-154-3p (SEQ ID NO: 1751), hsa-miR-122-3p (SEQ ID NO: 1752), hsa-miR-1270 (SEQ ID NO: 1753), hsa-miR-769-3p (SEQ ID NO: 1754), hsa-miR-3168 (SEQ ID NO: 1755), hsa-miR-143-3p (SEQ ID NO: 1756), hsa-miR-6874-5p (SEQ ID NO: 1757), hsa-miR-516b-3p (SEQ ID NO: 1758), hsa-miR-4677-5p (SEQ ID NO: 1759), hsa-miR-10b-5p (SEQ ID NO: 1760), hsa-miR-7705 (SEQ ID NO: 1761), hsa-miR-6755-5p (SEQ ID NO: 1762), hsa-miR-6847-3p (SEQ ID NO: 1763), hsa-miR-512-3p (SEQ ID NO: 1764), hsa-miR-153-3p (SEQ ID NO: 1765), hsa-miR-4454 (SEQ ID NO: 1766), hsa-miR-8064 (SEQ ID NO: 1767), hsa-miR-7110-3p (SEQ ID NO: 1768), hsa-miR-423-3p (SEQ ID NO: 1769), hsa-miR-331-5p (SEQ ID NO: 1770), hsa-miR-190a-3p (SEQ ID NO: 1771), hsa-miR-610 (SEQ ID NO: 1772), hsa-miR-198 (SEQ ID NO: 1773), hsa-miR-4536-5p (SEQ ID NO: 1774), hsa-miR-4760-5p (SEQ ID NO: 1775), hsa-miR-3924 (SEQ ID NO: 1776), hsa-miR-5692b (SEQ ID NO: 1777), hsa-miR-6742-5p (SEQ ID NO: 1778), hsa-miR-935 (SEQ ID NO: 1779), hsa-miR-612 (SEQ ID NO: 1780), hsa-miR-8089 (SEQ ID NO: 1781), hsa-miR-6774-3p (SEQ ID NO: 1782), hsa-miR-4503 (SEQ ID NO: 1783), hsa-miR-762 (SEQ ID NO: 1784), hsa-miR-150-3p (SEQ ID NO: 1785), hsa-miR-4999-3p (SEQ ID NO: 1786), hsa-miR-548aq-5p (SEQ ID NO: 1787), hsa-miR-6883-3p (SEQ ID NO: 1788), hsa-miR-497-3p (SEQ ID NO: 1789), hsa-miR-3689c (SEQ ID NO: 1790), hsa-miR-548bb-3p (SEQ ID NO: 1791), hsa-miR-8082 (SEQ ID NO: 1792), hsa-miR-4315 (SEQ ID NO: 1793), hsa-miR-6818-5p (SEQ ID NO: 1794), hsa-miR-6506-5p (SEQ ID NO: 1795), hsa-miR-676-3p (SEQ ID NO: 1796), hsa-miR-6508-3p (SEQ ID NO: 1797), hsa-miR-3181 (SEQ ID NO: 1798), hsa-miR-3927-3p (SEQ ID NO: 1799), hsa-miR-5193 (SEQ ID NO: 1800), hsa-miR-376b-3p (SEQ ID NO: 1801), hsa-miR-7843-5p (SEQ ID NO: 1802), hsa-miR-6781-3p (SEQ ID NO: 1803), hsa-miR-4259 (SEQ ID NO: 1804), hsa-miR-371a-5p (SEQ ID NO: 1805), hsa-miR-548e-5p (SEQ ID NO: 1806), hsa-miR-651-5p (SEQ ID NO: 1807), hsa-miR-10397-3p (SEQ ID NO: 1808), hsa-miR-422a (SEQ ID NO: 1809), hsa-miR-4642 (SEQ ID NO: 1810), hsa-miR-4724-3p (SEQ ID NO: 1811), hsa-miR-7160-3p (SEQ ID NO: 1812), hsa-miR-6744-5p (SEQ ID NO: 1813), hsa-miR-4524a-3p (SEQ ID NO: 1814), hsa-miR-873-3p (SEQ ID NO: 1815), hsa-miR-362-3p (SEQ ID NO: 1816), hsa-miR-4758-3p (SEQ ID NO: 1817), hsa-miR-1263 (SEQ ID NO: 1818), hsa-miR-6512-3p (SEQ ID NO: 1819), hsa-miR-3911 (SEQ ID NO: 1820), hsa-miR-6073 (SEQ ID NO: 1821), hsa-miR-1257 (SEQ ID NO: 1822), hsa-miR-670-5p (SEQ ID NO: 1823), hsa-miR-4429 (SEQ ID NO: 1824), hsa-miR-4711-5p (SEQ ID NO: 1825), hsa-miR-3646 (SEQ ID NO: 1826), hsa-miR-4667-5p (SEQ ID NO: 1827), hsa-miR-6085 (SEQ ID NO: 1828), hsa-miR-146b-5p (SEQ ID NO: 1829), hsa-miR-6730-5p (SEQ ID NO: 1830), hsa-miR-378a-3p (SEQ ID NO: 1831), hsa-miR-3650 (SEQ ID NO: 1832), hsa-miR-4798-3p (SEQ ID NO: 1833), hsa-miR-4789-5p (SEQ ID NO: 1834), hsa-miR-4686 (SEQ ID NO: 1835), hsa-miR-133b (SEQ ID NO: 1836), hsa-miR-12128 (SEQ ID NO: 1837), hsa-miR-548ah-3p (SEQ ID NO: 1838), hsa-miR-3663-5p (SEQ ID NO: 1839), hsa-miR-4728-3p (SEQ ID NO: 1840), hsa-miR-410-5p (SEQ ID NO: 1841), hsa-miR-4664-3p (SEQ ID NO: 1842), hsa-miR-548q (SEQ ID NO: 1843), hsa-miR-15b-5p (SEQ ID NO: 1844), hsa-miR-4659b-5p (SEQ ID NO: 1845), hsa-miR-572 (SEQ ID NO: 1846), hsa-miR-4485-3p (SEQ ID NO: 1847), hsa-miR-4478 (SEQ ID NO: 1848), hsa-miR-4307 (SEQ ID NO: 1849), hsa-miR-3648 (SEQ ID NO: 1850), hsa-miR-6081 (SEQ ID NO: 1851), hsa-miR-10399-5p (SEQ ID NO: 1852), hsa-miR-937-5p (SEQ ID NO: 1853), hsa-miR-181d-3p (SEQ ID NO: 1854), hsa-miR-128-3p (SEQ ID NO: 1855), hsa-miR-6829-5p (SEQ ID NO: 1856), hsa-miR-7856-5p (SEQ ID NO: 1857), hsa-miR-4756-5p (SEQ ID NO: 1858), hsa-miR-3175 (SEQ ID NO: 1859), hsa-miR-3158-5p (SEQ ID NO: 1860), hsa-miR-4632-3p (SEQ ID NO: 1861), hsa-miR-1237-3p (SEQ ID NO: 1862), hsa-miR-4517 (SEQ ID NO: 1863), hsa-miR-155-3p (SEQ ID NO: 1864), hsa-miR-3128 (SEQ ID NO: 1865), hsa-miR-1268a (SEQ ID NO: 1866), hsa-miR-4661-3p (SEQ ID NO: 1867), hsa-miR-7152-3p (SEQ ID NO: 1868), hsa-miR-6828-3p (SEQ ID NO: 1869), hsa-miR-4444 (SEQ ID NO: 1870), hsa-miR-8056 (SEQ ID NO: 1871), hsa-miR-6757-5p (SEQ ID NO: 1872), hsa-miR-501-5p (SEQ ID NO: 1873), hsa-miR-6838-5p (SEQ ID NO: 1874), hsa-miR-342-5p (SEQ ID NO: 1875), hsa-miR-6758-5p (SEQ ID NO: 1876), hsa-miR-1229-3p (SEQ ID NO: 1877), hsa-miR-1284 (SEQ ID NO: 1878), hsa-miR-642a-3p (SEQ ID NO: 1879), hsa-miR-1229-5p (SEQ ID NO: 1880), hsa-miR-3185 (SEQ ID NO: 1881), hsa-miR-4270 (SEQ ID NO: 1882), hsa-miR-556-5p (SEQ ID NO: 1883), hsa-miR-4705 (SEQ ID NO: 1884), hsa-miR-519a-5p (SEQ ID NO: 1885), hsa-miR-5094 (SEQ ID NO: 1886), hsa-miR-759 (SEQ ID NO: 1887), hsa-miR-145-3p (SEQ ID NO: 1888), hsa-miR-375-5p (SEQ ID NO: 1889), hsa-miR-2116-5p (SEQ ID NO: 1890), hsa-miR-4741 (SEQ ID NO: 1891), hsa-miR-6789-5p (SEQ ID NO: 1892), hsa-miR-548t-5p (SEQ ID NO: 1893), hsa-miR-29c-3p (SEQ ID NO: 1894), hsa-let-7f-5p (SEQ ID NO: 1895), hsa-miR-483-5p (SEQ ID NO: 1896), hsa-miR-1539 (SEQ ID NO: 1897), hsa-miR-6842-5p (SEQ ID NO: 1898), hsa-miR-4745-5p (SEQ ID NO: 1899), hsa-miR-3675-3p (SEQ ID NO: 1900), hsa-miR-7111-5p (SEQ ID NO: 1901), hsa-let-7d-5p (SEQ ID NO: 1902), hsa-miR-10526-3p (SEQ ID NO: 1903), hsa-miR-12118 (SEQ ID NO: 1904), hsa-miR-30e-5p (SEQ ID NO: 1905), hsa-miR-1271-5p (SEQ ID NO: 1906), hsa-miR-555 (SEQ ID NO: 1907), hsa-miR-18a-3p (SEQ ID NO: 1908), hsa-miR-1255b-2-3p (SEQ ID NO: 1909), hsa-miR-378b (SEQ ID NO: 1910), hsa-miR-7161-5p (SEQ ID NO: 1911), hsa-miR-5007-3p (SEQ ID NO: 1912), hsa-miR-3915 (SEQ ID NO: 1913), hsa-miR-4462 (SEQ ID NO: 1914), hsa-miR-369-5p (SEQ ID NO: 1915), hsa-miR-6820-3p (SEQ ID NO: 1916), hsa-miR-5704 (SEQ ID NO: 1917), hsa-miR-4537 (SEQ ID NO: 1918), hsa-miR-4450 (SEQ ID NO: 1919), hsa-miR-4321 (SEQ ID NO: 1920), hsa-miR-4799-3p (SEQ ID NO: 1921), hsa-miR-4745-3p (SEQ ID NO: 1922), hsa-miR-4725-5p (SEQ ID NO: 1923), hsa-miR-6862-5p (SEQ ID NO: 1924), hsa-miR-654-5p (SEQ ID NO: 1925), hsa-miR-9851-5p (SEQ ID NO: 1926), hsa-miR-99a-3p (SEQ ID NO: 1927), hsa-miR-626 (SEQ ID NO: 1928), hsa-miR-10398-3p (SEQ ID NO: 1929), hsa-miR-130b-5p (SEQ ID NO: 1930), hsa-miR-487a-5p (SEQ ID NO: 1931), hsa-miR-6799-3p (SEQ ID NO: 1932), hsa-miR-3064-3p (SEQ ID NO: 1933), hsa-miR-6726-3p (SEQ ID NO: 1934), hsa-miR-548au-3p (SEQ ID NO: 1935), hsa-miR-939-5p (SEQ ID NO: 1936), hsa-miR-485-5p (SEQ ID NO: 1937), hsa-miR-4251 (SEQ ID NO: 1938), hsa-miR-9985 (SEQ ID NO: 1939), hsa-miR-7158-3p (SEQ ID NO: 1940), hsa-miR-4506 (SEQ ID NO: 1941), hsa-miR-6880-3p (SEQ ID NO: 1942), hsa-miR-144-5p (SEQ ID NO: 1943), hsa-miR-122-5p (SEQ ID NO: 1944), hsa-miR-548f-5p (SEQ ID NO: 1945), hsa-miR-206 (SEQ ID NO: 1946), hsa-miR-136-5p (SEQ ID NO: 1947), hsa-miR-4715-5p (SEQ ID NO: 1948), hsa-miR-6810-3p (SEQ ID NO: 1949), hsa-miR-8072 (SEQ ID NO: 1950), hsa-miR-4295 (SEQ ID NO: 1951), hsa-miR-5195-3p (SEQ ID NO: 1952), hsa-miR-12131 (SEQ ID NO: 1953), hsa-miR-3689f (SEQ ID NO: 1954), hsa-miR-1972 (SEQ ID NO: 1955), hsa-miR-340-5p (SEQ ID NO: 1956), hsa-miR-3120-5p (SEQ ID NO: 1957), hsa-miR-485-3p (SEQ ID NO: 1958), hsa-miR-632 (SEQ ID NO: 1959), hsa-miR-25-3p (SEQ ID NO: 1960), hsa-miR-4684-3p (SEQ ID NO: 1961), hsa-miR-6728-5p (SEQ ID NO: 1962), hsa-miR-147b-5p (SEQ ID NO: 1963), hsa-miR-4289 (SEQ ID NO: 1964), hsa-miR-3688-3p (SEQ ID NO: 1965), hsa-miR-6851-5p (SEQ ID NO: 1966), hsa-miR-455-3p (SEQ ID NO: 1967), hsa-miR-425-5p (SEQ ID NO: 1968), hsa-miR-181c-5p (SEQ ID NO: 1969), hsa-miR-6717-5p (SEQ ID NO: 1970), hsa-miR-5685 (SEQ ID NO: 1971), hsa-miR-3668 (SEQ ID NO: 1972), hsa-miR-338-3p (SEQ ID NO: 1973), hsa-miR-499b-5p (SEQ ID NO: 1974), hsa-miR-153-5p (SEQ ID NO: 1975), hsa-miR-4703-3p (SEQ ID NO: 1976), hsa-miR-211-5p (SEQ ID NO: 1977), hsa-miR-767-5p (SEQ ID NO: 1978), hsa-miR-101-2-5p (SEQ ID NO: 1979), hsa-miR-219a-5p (SEQ ID NO: 1980), hsa-miR-219a-1-3p (SEQ ID NO: 1981), hsa-miR-4436b-5p (SEQ ID NO: 1982), hsa-miR-5572 (SEQ ID NO: 1983), hsa-miR-3121-5p (SEQ ID NO: 1984), hsa-miR-4523 (SEQ ID NO: 1985), hsa-miR-140-3p (SEQ ID NO: 1986), hsa-miR-3659 (SEQ ID NO: 1987), hsa-miR-3679-3p (SEQ ID NO: 1988), hsa-miR-4526 (SEQ ID NO: 1989), hsa-miR-7850-5p (SEQ ID NO: 1990), hsa-miR-6134 (SEQ ID NO: 1991), hsa-miR-625-5p (SEQ ID NO: 1992), hsa-miR-369-3p (SEQ ID NO: 1993), hsa-miR-1287-3p (SEQ ID NO: 1994), hsa-miR-132-3p (SEQ ID NO: 1995), hsa-miR-1537-5p (SEQ ID NO: 1996), hsa-miR-6882-5p (SEQ ID NO: 1997), hsa-miR-5002-3p (SEQ ID NO: 1998), hsa-miR-639 (SEQ ID NO: 1999), hsa-miR-6756-5p (SEQ ID NO: 2000), hsa-miR-1908-3p (SEQ ID NO: 2001), hsa-miR-6811-3p (SEQ ID NO: 2002), hsa-miR-6514-3p (SEQ ID NO: 2003), hsa-miR-6738-3p (SEQ ID NO: 2004), hsa-miR-548 h-5p (SEQ ID NO: 2005), hsa-miR-595 (SEQ ID NO: 2006), hsa-miR-662 (SEQ ID NO: 2007), hsa-miR-130a-3p (SEQ ID NO: 2008), hsa-miR-4736 (SEQ ID NO: 2009), hsa-miR-5088-3p (SEQ ID NO: 2010), hsa-miR-5004-5p (SEQ ID NO: 2011), hsa-miR-142-3p (SEQ ID NO: 2012), hsa-miR-4474-5p (SEQ ID NO: 2013), hsa-miR-520d-5p (SEQ ID NO: 2014), hsa-miR-1205 (SEQ ID NO: 2015), hsa-miR-1537-3p (SEQ ID NO: 2016), hsa-miR-9898 (SEQ ID NO: 2017), hsa-miR-5187-5p (SEQ ID NO: 2018), hsa-miR-4428 (SEQ ID NO: 2019), hsa-miR-4646-3p (SEQ ID NO: 2020), hsa-miR-3529-5p (SEQ ID NO: 2021), hsa-miR-6809-3p (SEQ ID NO: 2022), hsa-miR-1-5p (SEQ ID NO: 2023), hsa-miR-27a-3p (SEQ ID NO: 2024), hsa-miR-671-5p (SEQ ID NO: 2025), hsa-miR-5007-5p (SEQ ID NO: 2026), hsa-miR-1285-5p (SEQ ID NO: 2027), hsa-miR-3919 (SEQ ID NO: 2028), hsa-miR-8059 (SEQ ID NO: 2029), hsa-miR-539-5p (SEQ ID NO: 2030), hsa-miR-3124-3p (SEQ ID NO: 2031), hsa-miR-33b-5p (SEQ ID NO: 2032), hsa-miR-7108-3p (SEQ ID NO: 2033), hsa-miR-3916 (SEQ ID NO: 2034), hsa-miR-4275 (SEQ ID NO: 2035), hsa-miR-6744-3p (SEQ ID NO: 2036), hsa-miR-3649 (SEQ ID NO: 2037), hsa-miR-3170 (SEQ ID NO: 2038), hsa-miR-6756-3p (SEQ ID NO: 2039), hsa-miR-4754 (SEQ ID NO: 2040), hsa-miR-5586-3p (SEQ ID NO: 2041), hsa-miR-490-5p (SEQ ID NO: 2042), hsa-miR-34c-5p (SEQ ID NO: 2043), hsa-miR-522-3p (SEQ ID NO: 2044), hsa-miR-4306 (SEQ ID NO: 2045), hsa-miR-3689b-5p (SEQ ID NO: 2046), hsa-miR-4515 (SEQ ID NO: 2047), hsa-miR-373-3p (SEQ ID NO: 2048), hsa-miR-365b-5p (SEQ ID NO: 2049), hsa-miR-4802-3p (SEQ ID NO: 2050), hsa-miR-548aj-3p (SEQ ID NO: 2051), hsa-miR-185-5p (SEQ ID NO: 2052), hsa-miR-6876-3p (SEQ ID NO: 2053), hsa-miR-3127-5p (SEQ ID NO: 2054), hsa-miR-6503-3p (SEQ ID NO: 2055), hsa-miR-3180-5p (SEQ ID NO: 2056), hsa-miR-5698 (SEQ ID NO: 2057), hsa-miR-4477b (SEQ ID NO: 2058), hsa-miR-548ah-5p (SEQ ID NO: 2059), hsa-miR-888-5p (SEQ ID NO: 2060), hsa-miR-7-2-3p (SEQ ID NO: 2061), hsa-miR-4520-2-3p (SEQ ID NO: 2062), hsa-miR-3123 (SEQ ID NO: 2063), hsa-miR-4693-5p (SEQ ID NO: 2064), hsa-miR-6077 (SEQ ID NO: 2065), hsa-miR-6807-3p (SEQ ID NO: 2066), hsa-miR-4283 (SEQ ID NO: 2067), hsa-miR-549a-3p (SEQ ID NO: 2068), hsa-miR-12121 (SEQ ID NO: 2069), hsa-miR-922 (SEQ ID NO: 2070), hsa-miR-4789-3p (SEQ ID NO: 2071), hsa-miR-6890-5p (SEQ ID NO: 2072), hsa-miR-4284 (SEQ ID NO: 2073), hsa-miR-7702 (SEQ ID NO: 2074), hsa-miR-513a-5p (SEQ ID NO: 2075), hsa-miR-6787-5p (SEQ ID NO: 2076), hsa-miR-3667-5p (SEQ ID NO: 2077), hsa-miR-450a-5p (SEQ ID NO: 2078), hsa-miR-3118 (SEQ ID NO: 2079), hsa-miR-6076 (SEQ ID NO: 2080), hsa-miR-1290 (SEQ ID NO: 2081), hsa-miR-3163 (SEQ ID NO: 2082), hsa-miR-7154-5p (SEQ ID NO: 2083), hsa-miR-663a (SEQ ID NO: 2084), hsa-miR-6824-5p (SEQ ID NO: 2085), hsa-miR-9-5p (SEQ ID NO: 2086), hsa-miR-548f-3p (SEQ ID NO: 2087), hsa-miR-378c (SEQ ID NO: 2088), hsa-miR-216a-3p (SEQ ID NO: 2089), hsa-miR-892c-3p (SEQ ID NO: 2090), hsa-miR-6831-5p (SEQ ID NO: 2091), hsa-miR-125a-5p (SEQ ID NO: 2092), hsa-miR-378e (SEQ ID NO: 2093), hsa-miR-3617-5p (SEQ ID NO: 2094), hsa-miR-3662 (SEQ ID NO: 2095), hsa-miR-604 (SEQ ID NO: 2096), hsa-miR-4278 (SEQ ID NO: 2097), hsa-miR-3140-3p (SEQ ID NO: 2098), hsa-miR-181b-2-3p (SEQ ID NO: 2099), hsa-miR-4540 (SEQ ID NO: 2100), hsa-miR-6130 (SEQ ID NO: 2101), hsa-miR-3907 (SEQ ID NO: 2102), hsa-miR-493-3p (SEQ ID NO: 2103), hsa-miR-5009-3p (SEQ ID NO: 2104), hsa-miR-4456 (SEQ ID NO: 2105), hsa-miR-99a-5p (SEQ ID NO: 2106), hsa-miR-4743-5p (SEQ ID NO: 2107), hsa-miR-196a-5p (SEQ ID NO: 2108), hsa-miR-4723-3p (SEQ ID NO: 2109), hsa-miR-6763-5p (SEQ ID NO: 2110), hsa-miR-6809-5p (SEQ ID NO: 2111), hsa-miR-890 (SEQ ID NO: 2112), hsa-miR-4667-3p (SEQ ID NO: 2113), hsa-miR-1247-5p (SEQ ID NO: 2114), hsa-miR-6512-5p (SEQ ID NO: 2115), hsa-miR-3613-3p (SEQ ID NO: 2116), hsa-miR-548a-5p (SEQ ID NO: 2117), hsa-miR-526b-3p (SEQ ID NO: 2118), hsa-miR-1180-5p (SEQ ID NO: 2119), hsa-miR-4669 (SEQ ID NO: 2120), hsa-miR-497-5p (SEQ ID NO: 2121), hsa-miR-4426 (SEQ ID NO: 2122), hsa-miR-3976 (SEQ ID NO: 2123), hsa-miR-3196 (SEQ ID NO: 2124), hsa-miR-6840-5p (SEQ ID NO: 2125), hsa-miR-6889-5p (SEQ ID NO: 2126), hsa-miR-642b-3p (SEQ ID NO: 2127), hsa-miR-363-3p (SEQ ID NO: 2128), hsa-miR-3620-3p (SEQ ID NO: 2129), hsa-miR-4265 (SEQ ID NO: 2130), hsa-miR-3154 (SEQ ID NO: 2131), hsa-miR-6869-5p (SEQ ID NO: 2132), hsa-miR-320a-5p (SEQ ID NO: 2133), hsa-miR-4685-5p (SEQ ID NO: 2134), hsa-miR-4520-3p (SEQ ID NO: 2135), hsa-miR-6853-3p (SEQ ID NO: 2136), hsa-miR-3978 (SEQ ID NO: 2137), hsa-miR-5683 (SEQ ID NO: 2138), hsa-miR-493-5p (SEQ ID NO: 2139), hsa-miR-4675 (SEQ ID NO: 2140), hsa-miR-629-5p (SEQ ID NO: 2141), hsa-miR-6776-3p (SEQ ID NO: 2142), hsa-miR-4423-5p (SEQ ID NO: 2143), hsa-miR-5009-5p (SEQ ID NO: 2144), hsa-miR-6780b-3p (SEQ ID NO: 2145), hsa-miR-655-3p (SEQ ID NO: 2146), hsa-miR-181d-5p (SEQ ID NO: 2147), hsa-miR-4443 (SEQ ID NO: 2148), hsa-miR-4528 (SEQ ID NO: 2149), hsa-miR-2116-3p (SEQ ID NO: 2150), hsa-miR-12117 (SEQ ID NO: 2151), hsa-miR-6895-5p (SEQ ID NO: 2152), hsa-miR-22-5p (SEQ ID NO: 2153), hsa-miR-3190-3p (SEQ ID NO: 2154), hsa-miR-548m (SEQ ID NO: 2155), hsa-miR-18b-3p (SEQ ID NO: 2156), hsa-miR-28-5p (SEQ ID NO: 2157), hsa-miR-6070 (SEQ ID NO: 2158), hsa-miR-323a-3p (SEQ ID NO: 2159), hsa-miR-8068 (SEQ ID NO: 2160), hsa-miR-3173-3p (SEQ ID NO: 2161), hsa-miR-6767-5p (SEQ ID NO: 2162), hsa-miR-6861-5p (SEQ ID NO: 2163), hsa-miR-8061 (SEQ ID NO: 2164), hsa-miR-519c-3p (SEQ ID NO: 2165), hsa-miR-6785-3p (SEQ ID NO: 2166), hsa-miR-129-5p (SEQ ID NO: 2167), hsa-miR-1295b-3p (SEQ ID NO: 2168), hsa-miR-4733-5p (SEQ ID NO: 2169), hsa-miR-9903 (SEQ ID NO: 2170), hsa-miR-3136-3p (SEQ ID NO: 2171), hsa-miR-7159-3p (SEQ ID NO: 2172), hsa-miR-658 (SEQ ID NO: 2173), hsa-miR-182-5p (SEQ ID NO: 2174), hsa-miR-5588-5p (SEQ ID NO: 2175), hsa-miR-548ak (SEQ ID NO: 2176), hsa-miR-3143 (SEQ ID NO: 2177), hsa-miR-6529-3p (SEQ ID NO: 2178), hsa-miR-504-5p (SEQ ID NO: 2179), hsa-miR-411-3p (SEQ ID NO: 2180), hsa-miR-4439 (SEQ ID NO: 2181), hsa-miR-7111-3p (SEQ ID NO: 2182), hsa-miR-514a-3p (SEQ ID NO: 2183), hsa-miR-6727-5p (SEQ ID NO: 2184), hsa-miR-4672 (SEQ ID NO: 2185), hsa-miR-4714-3p (SEQ ID NO: 2186), hsa-miR-4753-3p (SEQ ID NO: 2187), hsa-miR-1825 (SEQ ID NO: 2188), hsa-miR-3925-5p (SEQ ID NO: 2189), hsa-miR-132-5p (SEQ ID NO: 2190), hsa-miR-6509-5p (SEQ ID NO: 2191), hsa-miR-4699-5p (SEQ ID NO: 2192), hsa-miR-5787 (SEQ ID NO: 2193), hsa-miR-1909-3p (SEQ ID NO: 2194), hsa-miR-147b-3p (SEQ ID NO: 2195), hsa-miR-30c-5p (SEQ ID NO: 2196), hsa-miR-455-5p (SEQ ID NO: 2197), hsa-miR-4761-3p (SEQ ID NO: 2198), hsa-miR-5585-3p (SEQ ID NO: 2199), hsa-miR-4760-3p (SEQ ID NO: 2200), hsa-miR-1911-3p (SEQ ID NO: 2201), hsa-miR-6889-3p (SEQ ID NO: 2202), hsa-miR-6893-3p (SEQ ID NO: 2203), hsa-miR-195-3p (SEQ ID NO: 2204), hsa-miR-1303 (SEQ ID NO: 2205), hsa-miR-5589-3p (SEQ ID NO: 2206), hsa-miR-10392-5p (SEQ ID NO: 2207), hsa-miR-4649-3p (SEQ ID NO: 2208), hsa-miR-548aj-5p (SEQ ID NO: 2209), hsa-miR-4747-3p (SEQ ID NO: 2210), hsa-miR-7161-3p (SEQ ID NO: 2211), hsa-miR-1295a (SEQ ID NO: 2212), hsa-miR-376b-5p (SEQ ID NO: 2213), hsa-miR-4637 (SEQ ID NO: 2214), hsa-miR-6800-5p (SEQ ID NO: 2215), hsa-miR-506-5p (SEQ ID NO: 2216), hsa-miR-1182 (SEQ ID NO: 2217), hsa-miR-653-3p (SEQ ID NO: 2218), hsa-miR-6871-3p (SEQ ID NO: 2219), hsa-miR-299-5p (SEQ ID NO: 2220), hsa-miR-548p (SEQ ID NO: 2221), hsa-miR-6803-5p (SEQ ID NO: 2222), hsa-miR-4470 (SEQ ID NO: 2223), hsa-miR-6788-5p (SEQ ID NO: 2224), hsa-miR-1203 (SEQ ID NO: 2225), hsa-miR-3137 (SEQ ID NO: 2226), hsa-miR-615-3p (SEQ ID NO: 2227), hsa-miR-5691 (SEQ ID NO: 2228), hsa-miR-1185-2-3p (SEQ ID NO: 2229), hsa-miR-548ad-3p (SEQ ID NO: 2230), hsa-miR-6776-5p (SEQ ID NO: 2231), hsa-miR-524-5p (SEQ ID NO: 2232), hsa-miR-3685 (SEQ ID NO: 2233), hsa-miR-7977 (SEQ ID NO: 2234), hsa-miR-4787-5p (SEQ ID NO: 2235), hsa-miR-519d-3p (SEQ ID NO: 2236), hsa-miR-449c-3p (SEQ ID NO: 2237), hsa-miR-5581-3p (SEQ ID NO: 2238), hsa-miR-10b-3p (SEQ ID NO: 2239), hsa-miR-454-5p (SEQ ID NO: 2240), hsa-miR-548ay-3p (SEQ ID NO: 2241), hsa-miR-10400-5p (SEQ ID NO: 2242), hsa-miR-5579-3p (SEQ ID NO: 2243), hsa-miR-4451 (SEQ ID NO: 2244), hsa-miR-5100 (SEQ ID NO: 2245), hsa-miR-92a-3p (SEQ ID NO: 2246), hsa-miR-337-3p (SEQ ID NO: 2247), hsa-miR-6852-5p (SEQ ID NO: 2248), hsa-miR-4763-3p (SEQ ID NO: 2249), hsa-miR-302f (SEQ ID NO: 2250), hsa-miR-548i (SEQ ID NO: 2251), hsa-miR-660-5p (SEQ ID NO: 2252), hsa-miR-6089 (SEQ ID NO: 2253), hsa-miR-520a-5p (SEQ ID NO: 2254), hsa-miR-4533 (SEQ ID NO: 2255), hsa-miR-12136 (SEQ ID NO: 2256), hsa-miR-7153-5p (SEQ ID NO: 2257), hsa-miR-3155b (SEQ ID NO: 2258), hsa-miR-151a-3p (SEQ ID NO: 2259), hsa-miR-3941 (SEQ ID NO: 2260), hsa-miR-135a-2-3p (SEQ ID NO: 2261), hsa-miR-200c-5p (SEQ ID NO: 2262), hsa-miR-1178-5p (SEQ ID NO: 2263), hsa-miR-26b-3p (SEQ ID NO: 2264), hsa-miR-1468-5p (SEQ ID NO: 2265), hsa-miR-8077 (SEQ ID NO: 2266), hsa-miR-523-5p (SEQ ID NO: 2267), hsa-miR-6715b-5p (SEQ ID NO: 2268), hsa-miR-4796-3p (SEQ ID NO: 2269), hsa-miR-6794-3p (SEQ ID NO: 2270), hsa-miR-4262 (SEQ ID NO: 2271), hsa-miR-582-3p (SEQ ID NO: 2272), hsa-miR-4433a-3p (SEQ ID NO: 2273), hsa-miR-106b-3p (SEQ ID NO: 2274), hsa-miR-6854-3p (SEQ ID NO: 2275), hsa-miR-5571-5p (SEQ ID NO: 2276), hsa-miR-3148 (SEQ ID NO: 2277), hsa-miR-433-5p (SEQ ID NO: 2278), hsa-miR-4762-3p (SEQ ID NO: 2279), hsa-miR-1269b (SEQ ID NO: 2280), hsa-miR-942-5p (SEQ ID NO: 2281), hsa-miR-4324 (SEQ ID NO: 2282), hsa-miR-129-2-3p (SEQ ID NO: 2283), hsa-miR-6739-3p (SEQ ID NO: 2284), hsa-miR-3177-5p (SEQ ID NO: 2285), hsa-miR-4492 (SEQ ID NO: 2286), hsa-miR-4779 (SEQ ID NO: 2287), hsa-miR-3126-3p (SEQ ID NO: 2288), hsa-miR-6760-5p (SEQ ID NO: 2289), hsa-miR-5001-3p (SEQ ID NO: 2290), hsa-miR-3145-3p (SEQ ID NO: 2291), hsa-miR-7109-3p (SEQ ID NO: 2292), hsa-miR-4670-5p (SEQ ID NO: 2293), hsa-miR-98-5p (SEQ ID NO: 2294), hsa-miR-6827-5p (SEQ ID NO: 2295), hsa-miR-29a-3p (SEQ ID NO: 2296), hsa-miR-362-5p (SEQ ID NO: 2297), hsa-miR-7113-3p (SEQ ID NO: 2298), hsa-miR-1286 (SEQ ID NO: 2299), hsa-miR-549a-5p (SEQ ID NO: 2300), hsa-miR-505-3p (SEQ ID NO: 2301), hsa-miR-3675-5p (SEQ ID NO: 2302), hsa-miR-15a-5p (SEQ ID NO: 2303), hsa-miR-7855-5p (SEQ ID NO: 2304), hsa-miR-548as-5p (SEQ ID NO: 2305), hsa-miR-642b-5p (SEQ ID NO: 2306), hsa-miR-619-3p (SEQ ID NO: 2307), hsa-miR-550a-3-5p (SEQ ID NO: 2308), hsa-miR-3622b-5p (SEQ ID NO: 2309), hsa-miR-6777-5p (SEQ ID NO: 2310), hsa-miR-147a (SEQ ID NO: 2311), hsa-miR-302d-5p (SEQ ID NO: 2312), hsa-miR-10525-3p (SEQ ID NO: 2313), hsa-miR-432-5p (SEQ ID NO: 2314), hsa-miR-204-3p (SEQ ID NO: 2315), hsa-miR-3663-3p (SEQ ID NO: 2316), hsa-miR-5093 (SEQ ID NO: 2317), hsa-miR-1913 (SEQ ID NO: 2318), hsa-miR-4529-5p (SEQ ID NO: 2319), hsa-miR-4666b (SEQ ID NO: 2320), hsa-miR-6886-5p (SEQ ID NO: 2321), hsa-miR-4309 (SEQ ID NO: 2322), hsa-miR-3184-5p (SEQ ID NO: 2323), hsa-miR-4633-5p (SEQ ID NO: 2324), hsa-miR-4290 (SEQ ID NO: 2325), hsa-miR-345-3p (SEQ ID NO: 2326), hsa-miR-3176 (SEQ ID NO: 2327), hsa-miR-6824-3p (SEQ ID NO: 2328), hsa-miR-9986 (SEQ ID NO: 2329), hsa-miR-502-5p (SEQ ID NO: 2330), hsa-miR-1180-3p (SEQ ID NO: 2331), hsa-miR-4464 (SEQ ID NO: 2332), hsa-miR-5187-3p (SEQ ID NO: 2333), hsa-miR-3944-5p (SEQ ID NO: 2334), hsa-miR-664a-3p (SEQ ID NO: 2335), hsa-miR-548at-5p (SEQ ID NO: 2336), hsa-miR-591 (SEQ ID NO: 2337), hsa-miR-143-5p (SEQ ID NO: 2338), hsa-miR-4753-5p (SEQ ID NO: 2339), hsa-miR-383-5p (SEQ ID NO: 2340), hsa-miR-6885-5p (SEQ ID NO: 2341), hsa-miR-503-5p (SEQ ID NO: 2342), hsa-miR-6875-5p (SEQ ID NO: 2343), hsa-miR-1234-3p (SEQ ID NO: 2344), hsa-miR-19a-5p (SEQ ID NO: 2345), hsa-miR-6779-5p (SEQ ID NO: 2346), hsa-miR-1233-3p (SEQ ID NO: 2347), hsa-miR-6769b-5p (SEQ ID NO: 2348), hsa-miR-133a-5p (SEQ ID NO: 2349), hsa-miR-2861 (SEQ ID NO: 2350), hsa-miR-6501-3p (SEQ ID NO: 2351), hsa-miR-1260b (SEQ ID NO: 2352), hsa-miR-4536-3p (SEQ ID NO: 2353), hsa-miR-185-3p (SEQ ID NO: 2354), hsa-miR-4529-3p (SEQ ID NO: 2355), hsa-miR-1243 (SEQ ID NO: 2356), hsa-miR-4738-5p (SEQ ID NO: 2357), hsa-miR-761 (SEQ ID NO: 2358), hsa-miR-5190 (SEQ ID NO: 2359), hsa-miR-4712-3p (SEQ ID NO: 2360), hsa-miR-6835-5p (SEQ ID NO: 2361), hsa-miR-6750-3p (SEQ ID NO: 2362), hsa-miR-6778-3p (SEQ ID NO: 2363), hsa-miR-4481 (SEQ ID NO: 2364), hsa-miR-4636 (SEQ ID NO: 2365), hsa-miR-10393-5p (SEQ ID NO: 2366), hsa-miR-449b-5p (SEQ ID NO: 2367), hsa-miR-6719-3p (SEQ ID NO: 2368), hsa-miR-4652-5p (SEQ ID NO: 2369), hsa-miR-4318 (SEQ ID NO: 2370), hsa-miR-7153-3p (SEQ ID NO: 2371), hsa-miR-1262 (SEQ ID NO: 2372), hsa-miR-4795-3p (SEQ ID NO: 2373), hsa-miR-374b-5p (SEQ ID NO: 2374), hsa-miR-29c-5p (SEQ ID NO: 2375), hsa-miR-30c-1-3p (SEQ ID NO: 2376), hsa-miR-548w (SEQ ID NO: 2377), hsa-miR-616-3p (SEQ ID NO: 2378), hsa-miR-12127 (SEQ ID NO: 2379), hsa-miR-561-5p (SEQ ID NO: 2380), hsa-miR-4445-5p (SEQ ID NO: 2381), hsa-miR-4786-3p (SEQ ID NO: 2382), hsa-miR-23b-5p (SEQ ID NO: 2383), hsa-miR-802 (SEQ ID NO: 2384), hsa-miR-125b-5p (SEQ ID NO: 2385), hsa-miR-596 (SEQ ID NO: 2386), hsa-miR-3651 (SEQ ID NO: 2387), hsa-miR-6804-5p (SEQ ID NO: 2388), hsa-miR-545-5p (SEQ ID NO: 2389), hsa-miR-4773 (SEQ ID NO: 2390), hsa-miR-371b-5p (SEQ ID NO: 2391), hsa-miR-4468 (SEQ ID NO: 2392), hsa-miR-519d-5p (SEQ ID NO: 2393), hsa-miR-4653-5p (SEQ ID NO: 2394), hsa-miR-302c-3p (SEQ ID NO: 2395), hsa-miR-516b-5p (SEQ ID NO: 2396), hsa-miR-671-3p (SEQ ID NO: 2397), hsa-miR-1261 (SEQ ID NO: 2398), hsa-miR-545-3p (SEQ ID NO: 2399), hsa-miR-184 (SEQ ID NO: 2400), hsa-miR-7107-3p (SEQ ID NO: 2401), hsa-miR-93-3p (SEQ ID NO: 2402), hsa-miR-7151-3p (SEQ ID NO: 2403), hsa-miR-128-2-5p (SEQ ID NO: 2404), hsa-miR-135b-5p (SEQ ID NO: 2405), hsa-miR-195-5p (SEQ ID NO: 2406), hsa-miR-11181-5p (SEQ ID NO: 2407), hsa-miR-548j-3p (SEQ ID NO: 2408), hsa-miR-651-3p (SEQ ID NO: 2409), hsa-miR-125a-3p (SEQ ID NO: 2410), hsa-miR-328-5p (SEQ ID NO: 2411), hsa-miR-8057 (SEQ ID NO: 2412), hsa-miR-6798-5p (SEQ ID NO: 2413), hsa-let-7a-2-3p (SEQ ID NO: 2414), hsa-miR-4258 (SEQ ID NO: 2415), hsa-miR-224-3p (SEQ ID NO: 2416), hsa-miR-6819-3p (SEQ ID NO: 2417), hsa-miR-520d-3p (SEQ ID NO: 2418), hsa-miR-4447 (SEQ ID NO: 2419), hsa-miR-6752-5p (SEQ ID NO: 2420), hsa-miR-450b-5p (SEQ ID NO: 2421), hsa-miR-3182 (SEQ ID NO: 2422), hsa-miR-4704-5p (SEQ ID NO: 2423), hsa-miR-6894-5p (SEQ ID NO: 2424), hsa-miR-4271 (SEQ ID NO: 2425), hsa-miR-6747-5p (SEQ ID NO: 2426), hsa-miR-4683 (SEQ ID NO: 2427), hsa-miR-4790-3p (SEQ ID NO: 2428), hsa-miR-6737-5p (SEQ ID NO: 2429), hsa-miR-6082 (SEQ ID NO: 2430), hsa-miR-4691-3p (SEQ ID NO: 2431), hsa-miR-1228-5p (SEQ ID NO: 2432), hsa-miR-3654 (SEQ ID NO: 2433), hsa-miR-7114-3p (SEQ ID NO: 2434), hsa-miR-299-3p (SEQ ID NO: 2435), hsa-miR-636 (SEQ ID NO: 2436), hsa-miR-4254 (SEQ ID NO: 2437), hsa-miR-578 (SEQ ID NO: 2438), hsa-miR-3150b-5p (SEQ ID NO: 2439), hsa-miR-6834-5p (SEQ ID NO: 2440), hsa-miR-3174 (SEQ ID NO: 2441), hsa-miR-6739-5p (SEQ ID NO: 2442), hsa-miR-1206 (SEQ ID NO: 2443), hsa-miR-934 (SEQ ID NO: 2444), hsa-miR-548am-3p (SEQ ID NO: 2445), hsa-miR-6823-5p (SEQ ID NO: 2446), hsa-miR-3939 (SEQ ID NO: 2447), hsa-miR-424-5p (SEQ ID NO: 2448), hsa-miR-194-5p (SEQ ID NO: 2449), hsa-miR-6868-5p (SEQ ID NO: 2450), hsa-miR-6502-3p (SEQ ID NO: 2451), hsa-miR-3667-3p (SEQ ID NO: 2452), hsa-miR-1322 (SEQ ID NO: 2453), hsa-miR-6842-3p (SEQ ID NO: 2454), hsa-miR-5189-3p (SEQ ID NO: 2455), hsa-miR-4742-3p (SEQ ID NO: 2456), hsa-miR-4495 (SEQ ID NO: 2457), hsa-miR-190b-5p (SEQ ID NO: 2458), hsa-miR-548bb-5p (SEQ ID NO: 2459), hsa-miR-4518 (SEQ ID NO: 2460), hsa-miR-3609 (SEQ ID NO: 2461), hsa-miR-609 (SEQ ID NO: 2462), hsa-miR-3944-3p (SEQ ID NO: 2463), hsa-miR-548aw (SEQ ID NO: 2464), hsa-miR-7110-5p (SEQ ID NO: 2465), hsa-miR-548a-3p (SEQ ID NO: 2466), hsa-miR-7975 (SEQ ID NO: 2467), hsa-miR-6126 (SEQ ID NO: 2468), hsa-miR-4440 (SEQ ID NO: 2469), hsa-miR-1255a (SEQ ID NO: 2470), hsa-miR-378 h (SEQ ID NO: 2471), hsa-miR-7976 (SEQ ID NO: 2472), hsa-miR-3059-3p (SEQ ID NO: 2473), hsa-miR-1468-3p (SEQ ID NO: 2474), hsa-miR-4719 (SEQ ID NO: 2475), hsa-miR-4727-5p (SEQ ID NO: 2476), hsa-miR-620 (SEQ ID NO: 2477), hsa-miR-451b (SEQ ID NO: 2478), hsa-miR-6832-3p (SEQ ID NO: 2479), hsa-miR-4660 (SEQ ID NO: 2480), hsa-miR-619-5p (SEQ ID NO: 2481), hsa-miR-6838-3p (SEQ ID NO: 2482), hsa-miR-6127 (SEQ ID NO: 2483), hsa-miR-597-5p (SEQ ID NO: 2484), hsa-miR-550a-3p (SEQ ID NO: 2485), hsa-miR-3144-3p (SEQ ID NO: 2486), hsa-let-7e-5p (SEQ ID NO: 2487), hsa-miR-3127-3p (SEQ ID NO: 2488), hsa-miR-4510 (SEQ ID NO: 2489), hsa-miR-4708-5p (SEQ ID NO: 2490), hsa-miR-4301 (SEQ ID NO: 2491), hsa-miR-1227-5p (SEQ ID NO: 2492), hsa-miR-8088 (SEQ ID NO: 2493), hsa-miR-5189-5p (SEQ ID NO: 2494), hsa-let-7f-1-3p (SEQ ID NO: 2495), hsa-miR-583 (SEQ ID NO: 2496), hsa-miR-760 (SEQ ID NO: 2497), hsa-miR-8063 (SEQ ID NO: 2498), hsa-let-7c-3p (SEQ ID NO: 2499), hsa-miR-611 (SEQ ID NO: 2500), hsa-miR-203b-3p (SEQ ID NO: 2501), hsa-miR-4724-5p (SEQ ID NO: 2502), hsa-miR-1296-3p (SEQ ID NO: 2503), hsa-miR-4703-5p (SEQ ID NO: 2504), hsa-miR-4700-3p (SEQ ID NO: 2505), hsa-miR-4287 (SEQ ID NO: 2506), hsa-miR-6843-3p (SEQ ID NO: 2507), hsa-miR-3929 (SEQ ID NO: 2508), hsa-miR-631 (SEQ ID NO: 2509), hsa-miR-7846-3p (SEQ ID NO: 2510), hsa-miR-3921 (SEQ ID NO: 2511), hsa-miR-6737-3p (SEQ ID NO: 2512), hsa-miR-125b-1-3p (SEQ ID NO: 2513), hsa-miR-4774-5p (SEQ ID NO: 2514), hsa-miR-4435 (SEQ ID NO: 2515), hsa-miR-6798-3p (SEQ ID NO: 2516), hsa-miR-4266 (SEQ ID NO: 2517), hsa-miR-4769-3p (SEQ ID NO: 2518), hsa-miR-1910-5p (SEQ ID NO: 2519), hsa-miR-548ab (SEQ ID NO: 2520), hsa-miR-181a-3p (SEQ ID NO: 2521), hsa-miR-664a-5p (SEQ ID NO: 2522), hsa-miR-12132 (SEQ ID NO: 2523), hsa-miR-4279 (SEQ ID NO: 2524), hsa-miR-466 (SEQ ID NO: 2525), hsa-miR-9899 (SEQ ID NO: 2526), hsa-miR-219b-3p (SEQ ID NO: 2527), hsa-miR-4425 (SEQ ID NO: 2528), hsa-miR-16-2-3p (SEQ ID NO: 2529), hsa-miR-1225-5p (SEQ ID NO: 2530), hsa-miR-7843-3p (SEQ ID NO: 2531), hsa-miR-4288 (SEQ ID NO: 2532), hsa-miR-181a-5p (SEQ ID NO: 2533), hsa-miR-4662a-3p (SEQ ID NO: 2534), hsa-miR-4766-3p (SEQ ID NO: 2535), hsa-miR-1245b-3p (SEQ ID NO: 2536), hsa-miR-6749-3p (SEQ ID NO: 2537), hsa-miR-5695 (SEQ ID NO: 2538), hsa-miR-1827 (SEQ ID NO: 2539), hsa-miR-1299 (SEQ ID NO: 2540), hsa-miR-374c-3p (SEQ ID NO: 2541), hsa-miR-4701-3p (SEQ ID NO: 2542), hsa-miR-7162-3p (SEQ ID NO: 2543), hsa-miR-6131 (SEQ ID NO: 2544), hsa-miR-6845-3p (SEQ ID NO: 2545), hsa-miR-320b (SEQ ID NO: 2546), hsa-miR-505-5p (SEQ ID NO: 2547), hsa-miR-4729 (SEQ ID NO: 2548), hsa-miR-6781-5p (SEQ ID NO: 2549), hsa-miR-3085-5p (SEQ ID NO: 2550), hsa-miR-6822-5p (SEQ ID NO: 2551), hsa-miR-3664-5p (SEQ ID NO: 2552), hsa-miR-192-5p (SEQ ID NO: 2553), hsa-miR-548l (SEQ ID NO: 2554), hsa-miR-9902 (SEQ ID NO: 2555), hsa-miR-6830-3p (SEQ ID NO: 2556), hsa-miR-1283 (SEQ ID NO: 2557), hsa-miR-6729-3p (SEQ ID NO: 2558), hsa-miR-5006-3p (SEQ ID NO: 2559), hsa-miR-5689 (SEQ ID NO: 2560), hsa-miR-412-3p (SEQ ID NO: 2561), hsa-miR-130b-3p (SEQ ID NO: 2562), hsa-let-7c-5p (SEQ ID NO: 2563), hsa-miR-548z (SEQ ID NO: 2564), hsa-miR-203a-3p (SEQ ID NO: 2565), hsa-miR-377-3p (SEQ ID NO: 2566), hsa-miR-6783-3p (SEQ ID NO: 2567), hsa-miR-498-3p (SEQ ID NO: 2568), hsa-miR-4319 (SEQ ID NO: 2569), hsa-miR-6841-5p (SEQ ID NO: 2570), hsa-miR-374c-5p (SEQ ID NO: 2571), hsa-miR-199b-3p (SEQ ID NO: 2572), hsa-miR-6165 (SEQ ID NO: 2573), hsa-miR-454-3p (SEQ ID NO: 2574), hsa-miR-12120 (SEQ ID NO: 2575), hsa-miR-4639-3p (SEQ ID NO: 2576), hsa-miR-1278 (SEQ ID NO: 2577), hsa-miR-5699-3p (SEQ ID NO: 2578), hsa-miR-6865-5p (SEQ ID NO: 2579), hsa-miR-6746-3p (SEQ ID NO: 2580), hsa-miR-6720-3p (SEQ ID NO: 2581), hsa-miR-874-5p (SEQ ID NO: 2582), hsa-miR-6505-3p (SEQ ID NO: 2583), hsa-miR-6849-5p (SEQ ID NO: 2584), hsa-miR-4473 (SEQ ID NO: 2585), hsa-miR-1973 (SEQ ID NO: 2586), hsa-miR-6786-5p (SEQ ID NO: 2587), hsa-miR-3129-3p (SEQ ID NO: 2588), hsa-miR-888-3p (SEQ ID NO: 2589), hsa-miR-6866-5p (SEQ ID NO: 2590), hsa-miR-6888-5p (SEQ ID NO: 2591), hsa-miR-107 (SEQ ID NO: 2592), hsa-miR-5003-5p (SEQ ID NO: 2593), hsa-miR-4804-5p (SEQ ID NO: 2594), hsa-miR-300 (SEQ ID NO: 2595), hsa-miR-6507-5p (SEQ ID NO: 2596), hsa-miR-3678-5p (SEQ ID NO: 2597), hsa-miR-6873-3p (SEQ ID NO: 2598), hsa-miR-4733-3p (SEQ ID NO: 2599), hsa-miR-4775 (SEQ ID NO: 2600), hsa-miR-3156-3p (SEQ ID NO: 2601), hsa-miR-4671-3p (SEQ ID NO: 2602), hsa-miR-4658 (SEQ ID NO: 2603), hsa-miR-933 (SEQ ID NO: 2604), hsa-miR-7845-5p (SEQ ID NO: 2605), hsa-miR-518c-3p (SEQ ID NO: 2606), hsa-miR-4666a-3p (SEQ ID NO: 2607), hsa-miR-3940-3p (SEQ ID NO: 2608), hsa-miR-218-2-3p (SEQ ID NO: 2609), hsa-miR-513c-3p (SEQ ID NO: 2610), hsa-miR-6742-3p (SEQ ID NO: 2611), hsa-miR-519b-5p (SEQ ID NO: 2612), hsa-miR-212-5p (SEQ ID NO: 2613), hsa-miR-889-3p (SEQ ID NO: 2614), hsa-miR-2054 (SEQ ID NO: 2615), hsa-miR-6796-3p (SEQ ID NO: 2616), hsa-miR-6732-3p (SEQ ID NO: 2617), hsa-miR-15a-3p (SEQ ID NO: 2618), hsa-miR-6790-5p (SEQ ID NO: 2619), hsa-miR-3614-3p (SEQ ID NO: 2620), hsa-miR-574-5p (SEQ ID NO: 2621), hsa-miR-33a-3p (SEQ ID NO: 2622), hsa-miR-1909-5p (SEQ ID NO: 2623), hsa-miR-548g-3p (SEQ ID NO: 2624), hsa-miR-1226-5p (SEQ ID NO: 2625), hsa-miR-5580-3p (SEQ ID NO: 2626), hsa-miR-4657 (SEQ ID NO: 2627), hsa-miR-3610 (SEQ ID NO: 2628), hsa-miR-4767 (SEQ ID NO: 2629), hsa-miR-296-3p (SEQ ID NO: 2630), hsa-miR-655-5p (SEQ ID NO: 2631), hsa-miR-7160-5p (SEQ ID NO: 2632), hsa-miR-6720-5p (SEQ ID NO: 2633), hsa-miR-4423-3p (SEQ ID NO: 2634), hsa-miR-519c-5p (SEQ ID NO: 2635), hsa-miR-877-3p (SEQ ID NO: 2636), hsa-miR-6752-3p (SEQ ID NO: 2637), hsa-miR-5008-3p (SEQ ID NO: 2638), hsa-miR-27b-3p (SEQ ID NO: 2639), hsa-miR-208b-3p (SEQ ID NO: 2640), hsa-miR-487b-5p (SEQ ID NO: 2641), hsa-miR-649 (SEQ ID NO: 2642), hsa-miR-326 (SEQ ID NO: 2643), hsa-miR-8085 (SEQ ID NO: 2644), hsa-miR-24-2-5p (SEQ ID NO: 2645), hsa-miR-1185-1-3p (SEQ ID NO: 2646), hsa-miR-548g-5p (SEQ ID NO: 2647), hsa-miR-4800-5p (SEQ ID NO: 2648), hsa-miR-6086 (SEQ ID NO: 2649), hsa-miR-6846-3p (SEQ ID NO: 2650), hsa-miR-10226 (SEQ ID NO: 2651), hsa-miR-3529-3p (SEQ ID NO: 2652), hsa-miR-4661-5p (SEQ ID NO: 2653), hsa-miR-548as-3p (SEQ ID NO: 2654), hsa-miR-6817-5p (SEQ ID NO: 2655), hsa-miR-6500-5p (SEQ ID NO: 2656), hsa-miR-5591-3p (SEQ ID NO: 2657), hsa-miR-6754-3p (SEQ ID NO: 2658), hsa-miR-16-5p (SEQ ID NO: 2659), hsa-miR-3159 (SEQ ID NO: 2660), hsa-miR-1302 (SEQ ID NO: 2661), hsa-miR-217-5p (SEQ ID NO: 2662), hsa-miR-558 (SEQ ID NO: 2663), hsa-miR-514b-3p (SEQ ID NO: 2664), hsa-miR-4785 (SEQ ID NO: 2665), hsa-miR-4723-5p (SEQ ID NO: 2666), hsa-miR-3671 (SEQ ID NO: 2667), hsa-miR-7706 (SEQ ID NO: 2668), hsa-miR-4502 (SEQ ID NO: 2669), hsa-miR-4294 (SEQ ID NO: 2670), hsa-miR-512-5p (SEQ ID NO: 2671), hsa-miR-191-5p (SEQ ID NO: 2672), or hsa-miR-1976 (SEQ ID NO: 2673).

[0079] In certain embodiments, the first domain of the first strand comprises 5 or more contiguous nucleobases on the 3′ end of the hsa-miR as provided above wherein each U is optionally individually and independently at each occurrence T. In certain embodiments, the first domain of the first strand comprises the 6 or more contiguous nucleobases on the 3′ end of the hsa-miR. In certain embodiments, the first domain of the first strand comprises the 7 or more contiguous nucleobases on the 3′ end of the hsa-miR. In certain embodiments, the first domain of the first strand comprises the 8 or more contiguous nucleobases on the 3′ end of the hsa-miR. In certain embodiments, the first domain of the first strand comprises the 9 or more contiguous nucleobases on the 3′ end of the hsa-miR. In certain embodiments, the first domain of the first strand comprises the 10 or more contiguous nucleobases on the 3′ end of the hsa-miR. In certain embodiments, the first domain of the first strand comprises the 11 or more contiguous nucleobases on the 3′ end of the hsa-miR. In certain embodiments, the first domain of the first strand comprises the 12 or more contiguous nucleobases on the 3′ end of the hsa-miR. In certain embodiments, the first domain of the first strand comprises the 13 contiguous nucleobases on the 3′ end of the hsa-miR. In certain embodiments, the first domain of the first strand comprises the 14 or more contiguous nucleobases on the 3′ end of the hsa-miR. In certain embodiments, the first domain of the first strand comprises the 15 or more contiguous nucleobases on the 3′ end of the hsa-miR. In certain embodiments, the first domain of the first strand comprises the 16 or more contiguous nucleobases on the 3′ end of the hsa-miR.

[0080] In certain embodiments, the second domain of the second strand is less than 16, 15, 14, 13, 12, 11, 10, 9, or 8 nucleobases.

[0081] In certain embodiments, the third domain of the second strand is between 12 and 4 nucleobases. In certain embodiments, the third domain of the second strand is less than 12, 11, 10, 9, 8, or 7 nucleobases, and more than 4, 5, 6, or 7 nucleobases.

[0082] In certain embodiments, the third domain of the second strand comprises 4 or more contiguous nucleobases that complement 4, 5, 6, or 7 or more nucleobases on the 5′ end of the hsa-miR.

[0083] In certain embodiments, the target RNA is messenger RNA. In certain embodiments, the target RNA is HIF1alpha messenger RNA.

[0084] In certain embodiments, this disclosure contemplates a conditional double stranded antisense oligonucleotide disclosed herein comprising/conjugated to a label.

[0085] In certain embodiments, this disclosure contemplates a particle comprising a conditional double stranded antisense oligonucleotide disclosed herein. In certain embodiments, the particle is a liposomal, viral, saccharide/polysaccharide or protein particle encapsulating the conditional double stranded antisense oligonucleotide.

[0086] In certain embodiments, this disclosure contemplates a pharmaceutical composition comprising a conditional double stranded antisense oligonucleotide or particle comprising the same as disclosed herein and a pharmaceutically acceptable excipient.

[0087] In certain embodiments, this disclosure contemplates an aqueous solution comprising a conditional double stranded antisense oligonucleotide disclosed herein or particles thereof optionally comprising salts, buffing agents, and/or saccharides or polysaccharides. In certain embodiments, this disclosure contemplates a pharmaceutical composition in the form of a tablet, pill, capsule, gel, gel capsule, or powder.

[0088] For therapeutic uses, the conditional double stranded antisense oligonucleotide or particle comprising the same as described herein may be formulated with a pharmaceutically acceptable excipient, such as physiological saline. Routes of administration for the compositions or agents described herein include systemic, subcutaneous, intravenous, intraperitoneal, intramuscular, or intradermal injections that provide continuous and sustained levels of the drug in the human patient.

[0089] Generally, for pharmaceutical use, the conditional double stranded antisense oligonucleotide or particle comprising the same may be formulated as a pharmaceutical preparation comprising a conditional double stranded antisense oligonucleotide or particle comprising the same and at least one pharmaceutically acceptable carrier, diluent, excipient and/or adjuvant, and optionally one or more further pharmaceutically active compounds.

[0090] The pharmaceutical preparations of the disclosure are preferably in a unit dosage form, and may be suitably packaged, for example, in a box, blister, vial, bottle, sachet, ampoule, or any other suitable single-dose or multi-dose holder or container (which may be properly labeled); optionally with one or more leaflets containing product information and/or instructions for use. Depending on the condition to be prevented or treated and the route of administration, such an effective amount will usually be between 0.1 and 500 mg per kilogram body weight of the patient per day, which may be administered as a single dose, divided over one or more daily doses. The amount(s) to be administered, the route of administration, and any further treatment regimen may be determined by the treating clinician, depending on factors such as age, gender, and general condition of the patient and the nature and severity of the disease/symptoms to be treated. Reference is made to U.S. Pat. Nos. 6,372,778, 6,369,086, 6,369,087, 6,372,733, as well as to the standard handbooks, such as the latest edition of Remington's Pharmaceutical Sciences.

[0091] Depending upon the manner of administration, the conditional double stranded antisense oligonucleotide or particle comprising the same as described herein may be formulated in a variety of ways. Solid dosage forms for oral administration include, but are not limited to, tablets, soft or hard gelatin or non-gelatin capsules, and caplets. However, liquid dosage forms, such as solutions, syrups, suspensions, shakes, etc. can also be utilized.

[0092] The carrier is all components present in the pharmaceutical formulations other than the active ingredient or ingredients. As generally used herein, “carrier” includes, but is not limited to, diluents, binders, lubricants, disintegrators, fillers, pH-modifying agents, preservatives, antioxidants, solubility enhancers, and coating compositions.

[0093] The carrier also includes all components of the coating composition which may include plasticizers, pigments, colorants, stabilizing agents, and glidants. Delayed release, extended release, and/or pulsatile release dosage formulations may be prepared as described in standard references, such as “Pharmaceutical dosage form tablets”, eds. Liberman et al. (New York, Marcel Dekker, Inc., 1989), “Remington—The science and practice of pharmacy”, 20^{th} et., Lippincott Williams & Wilkins, Baltimore, MD, 2000, and “Pharmaceutical dosage forms and drug delivery provide information on carriers, materials, equipment, and process for preparing tablets and capsules and delayed release dosage forms of tablets, capsules, and granules.

[0094] In certain embodiments, this disclosure contemplates kits comprising a conditional double stranded antisense oligonucleotide or particle comprising the same as disclosed herein and optionally a container, and optionally a pharmaceutically acceptable excipient. In certain embodiments, the container is a vial, capsule, syringe, or bottle/vial adapted with a septum for drawing liquid contents with a needle, syringe, cannula, or other transfer device.

[0095] In certain embodiments, this disclosure relates to methods of treating or preventing a disease or condition associated with target nucleic acid/RNA overexpression in a cell characterized by cell specific nucleic acid/RNA expression comprising administering to a subject in need thereof an effective amount of a conditional double stranded nucleobase polymer complex as disclosed herein.

[0096] As used herein, “subject” refers to any animal, preferably a human patient, livestock, or domestic pet.

[0097] As used herein, the terms “prevent” and “preventing” include the prevention of the recurrence, spread or onset. It is not intended that the present disclosure be limited to complete prevention. In some embodiments, the onset is delayed, or the severity is reduced.

[0098] As used herein, the terms “treat” and “treating” are not limited to the case where the subject (e.g., patient) is cured and the disease is eradicated. Rather, embodiments of the present disclosure also contemplate treatment that merely reduces symptoms, and/or delays disease progression.

[0099] “Cancer” refers any of various cellular diseases with malignant neoplasms characterized by the proliferation of cells. It is not intended that the diseased cells must actually invade surrounding tissue and metastasize to new body sites. Cancer can involve any tissue of the body and have many different forms in each body area. Within the context of certain embodiments, whether “cancer is reduced” may be identified by a variety of diagnostic manners known to one skill in the art including, but not limited to, observation the reduction in size or number of tumor masses or if an increase of apoptosis of cancer cells observed, e.g., if more than a 5% increase in apoptosis of cancer cells is observed for a sample compound compared to a control without the compound. It may also be identified by a change in relevant biomarker or gene expression profile, such as PSA for prostate cancer, HER2 for breast cancer, or others.

[0100] The cancer to be treated in the context of the present disclosure may be any type of cancer or tumor. In certain embodiments, the caner is a hematological cancer such as lymphoma, leukemia, or multiple myeloma. Also contemplated are malignancies located in the colon, abdomen, bone, breast, digestive system, liver, pancreas, peritoneum, endocrine glands (adrenal, parathyroid, hypophysis, testicles, ovaries, thymus, thyroid), eye, head and neck, nervous system (central and peripheral), lymphatic system, pelvis, skin, soft tissue, spleen, and thorax.

[0101] In certain embodiments, the method of administration is in a subject with a lymphodepleted environment due to prior or concurrent administration of lymphodepleting agents. In certain embodiments, lymphodepleting agents (e.g., cyclophosphamide and fludarabine).

[0102] In certain embodiments, the disease or condition is a cancer, cardiovascular disease, liver disease, type I diabetes, or type II diabetes. Contemplated cardiovascular diseases include calcific aortic valve disease (CAVD), atherosclerosis, myocardial infarction, stroke, congestive heart failure, or arrhythmia.

Design of miRNA-Inducible ASO

[0103] Conditional ASO are silenced due to the sequestration of the ASO sequence; however, upon triggering by the miRNA input, the conditional ASO was activated, allowing for binding and degradation of the target mRNA. The conditional ASO is a duplex formed by an extended ASO strand and a locking strand. The extended ASO strand was comprised of two domains: the parental ASO and a partial miRNA sequence at the 5′ terminus, i.e., the partial miRNA-ASO (pM-ASO) strand. The partial miRNA domain lacks the key seeding sequences (2-8 nt) of the miRNA, and hence avoids introducing the seeding sequence which may knockdown the miRNA target genes. The locking strand is composed of the complementary sequence to the entire miRNA and the parental ASO. Once hybridized, the two strands form a duplex with a single stranded toehold domain (FIG. 1). In the absence of the trigger miRNA, the duplex remains hybridized and the activity of the ASO is inhibited; whereas after internalization of the duplex by the trigger miRNA expressing cells, the miRNA binds to the toehold domain of the locking strand and thus initiates a competition reaction between miRNA and pM-ASO strand for the binding to the locking strand. If the binding of miRNA to the locking strand is favorable, the pM-ASO is displaced to expose and activate the ASO sequence. The activated ASO can then bind to and recruit RNase H to cleave the target mRNA (FIG. 1). Specifically, in the case of miR-122 inducible HIF1α ASO, the parental HIF1α ASO for conditional ASO is EZN2968, which is a 16 nt oligonucleotide with phosphorothioate (PS) backbone and locked nucleic acid (LNA) modification. miR-122-inducible HIF1α ASO is a duplex formed by the partial miR-122-EZN2968 (pM-EZN) strand and the locking strand.

### Optimization of Duplex Conformation of Conditional EZN2968

[0104] To create a selective and efficient miR-122 inducible EZN2968 ASO, the duplex was optimized for 1) minimum spontaneous dissociation (leakage) of the duplex in the absence of miR-122 to keep the HIF1α ASO activity low, and 2) a high miR-122 sensitivity that leads to maximum activation of the HIF1α ASO. These criteria can be met when the free energy (ΔG) of the conditional EZN2968 duplex is lower than the ΔG of pM-EZN/HIF1α mRNA duplex and higher than the ΔG of miR-122/locking strand duplex. The displacement mediated by the toehold (α domain) reduce the kinetic barrier for miR-122 triggered activation. Due to the thermostability of the completely locked duplex, its miR-122 sensitivity would be limited. To rationally enhance sensitivity to miR-122, several nucleotides can be removed (length of β domain) from the complementary sequence of EZN2968, rendering the duplex either in an end-destabilized conformation or in a bulge-destabilized conformation (FIG. 2A). The single stranded β domain may also function as a toehold and drive the separation of conditional EZN2968 upon binding of HIF1α mRNA reducing the kinetic barrier for HIF1α mRNA triggered leakage activation. Therefore, optimization of the duplex conformation and length of each domain is desired. Bulge destabilization is advantageous over end destabilization in terms of lower leakage activation triggered by HIF1α mRNA due to the relative inaccessibility of the bulge region for mRNA binding.

[0105] A library of chemically unmodified duplexes with different lengths (4 nt, 7 nt and 10 nt) of the toehold (α domain) and numbers of nucleotides removed in the duplex region (length of β domain) for both conformations. The duplexes were labeled with Cy5 on the 3′ termini of the pM-EZN strand and a quencher on the 5′ termini of the locking strand. Their de-hybridization upon triggering by a HIF1α mRNA mimicking strand was quantified by measuring the increase in fluorescence intensity driven by de-quenched Cy5 (FIG. 2B). The results showed that the percentage of displaced pM-EZN for all bulge destabilized duplexes were lower than their end destabilized counterparts, except for the ones with a 7 nt bulge and 7 nt or 10 nt toehold (FIG. 2D). The high leakage of 7 nt bulge duplexes may be attributed to lower thermodynamic stability because of the shorter double stranded domains as well as the lower stability of duplexes with larger bulge sizes. miRNA triggered activation was also measured with a similar assay, where the Cy5 and quencher-labeled duplexes were incubated with miR-122 mimicking sequence (FIG. 2C). The result showed that the miRNA triggered activation increased as the number of nucleotides removed from the duplex region (length of R domain) was increased for both conformations (FIG. 2D), due to the reduced stability of the duplexes indicated by calculated ΔG. Based on these results showing low HIF1α mRNA triggered leakage activation and high miR-122 sensitivity, or in other words, a higher miRNA to mRNA triggered activation ratio of the bulge-destabilized conformation. The bulge-destabilized duplex conformations were evaluated in vitro.

pM-EZN Strands Knock Down HIF1α in a Dose and Time Dependent Manner

[0106] To evaluate the potency of pM-EZN strands composed of partial miR-122 sequences for HIF1α knockdown as a benchmark, pM-EZN with 12 nt (pM12-EZN) or 15 nt (pM15-EZN) extension on the 5′ termini of EZN2968 were created. The pM-EZN strands were maintained the LNA modification and the PS backbone as the parental EZN2968. pM12-EZN or pM15-EZN were transfected in U373 cells, a glioblastoma cell line that expresses high level of HIF1α and negligible level of miR-122 and incubated for different time periods. These two strands knocked down HIF1α mRNA in a dose and time dependent manner, with a remarkable nearly complete knockdown at the condition of 200 nM concentration and 48 h incubation time. In addition, pM12-EZN and pM15-EZN knocked down HIF1α on both mRNA and protein level with similar potency. To confirm the inhibition of HIF1α activity by pM-EZN strands, LN229-V6R-Luc cells, which stably express luciferase under the control of a promoter containing Hypoxia Response Element (HRE) to report HIF1α activity, were transfected. Since this cell line expresses low amounts of luciferase at normoxic conditions, IOX4, a prolyl-hydroxylase 2 (PHD2) inhibitor, was added to inhibit HIF1α degradation and induce luciferase expression. Consistent with mRNA knockdown in U373 cells, transfection of 10 nM pM12-EZN and pM15-EZN led to significant reduction of luciferase expression in this reporter cell line.

Screening for Conditional EZN2968 with Minimum Spontaneous Leakage In Vitro

[0107] Experiments were performed to investigate the effect of chemical modification, bulge size and toehold length on the efficacy of locking strand in terms of spontaneous leakage of HIF1α knockdown activity. A library of 12 conditional EZN2968s were created by annealing pM12-EZN or pM15-EZN with 6 different locking strands (B0, B3, B5, B0*, B3*, and B5*) at a 1:1 ratio in PBS. Chemically modified (annotated with “*”) and unmodified locking strands were also compared to assess the role of nucleases in competition with the locking strand to inhibit EZN2968 activity. The locking strands are named based on the size of the bulge when hybridized to pM-EZN strand and the chemical modification. For example, B0 is the unmodified locking strand that does not generate a bulge when hybridized to pM-EZN strands; whereas B3* represents the chemically modified locking strand forming a 3 nt bulge duplex when hybridized to pM-EZN strands. Because backbone phosphorothioate (PS) modifications are reported to reduce affinity for complementary nucleic acid by about 0.5° C. per incorporation, LNA modifications were also incorporated in the locking strands to compensate for and maintain the thermodynamic stability of the duplex, i.e., it displays a similar melting temperature (Tm) compared to its unmodified counterpart. The resulting duplex library included permutations with a bulge size of 0 nt, 3 nt or 5 nt, a toehold length of 7 nt or 10 nt, and chemically modified (PS/LNA) or unmodified locking strands (FIG. 3A). The duplexes are termed based on the toehold length and bulge size of the duplex. For example, the duplex formed by pM12-EZN and B3* has a 10 nt toehold and a 3nt bulge, therefore it is named as T10B3*. The sequences are provided in the tables below.

TABLE 1
Oligonucleotide sequences for in buffer testing
of leakage activation of bulge and
end destabilized conditional EZN2968;
/3AmMO/ = 3′ amino modification;
/5IAbRQ/ = 5′ Iowa Black RQ;
/5AmMC6/ = 5′ amino modification;
“T” indicates a mismatch on the toehold
binding region.

| | Sequence | ID |
|---|---|---|
| Unmodified | CAA TGG TGT TTG TGG CAA | SEQ ID NO: 1 |
| pMI-EZN | GCA TCC IGT A/3AmMO/ | |
| Unmodified | TGA CAA TGG TGT TTG TGG | SEQ ID NO. 2 |
| pMI-EZN | CAA GCA TCC TGT A/3AmMO/ | |
| Unmodified | GTG TGA CAA TGG TGT TTG | SEQ ID NO: 3 |
| pMis-EZN | TGG CAA GCA TCC TGT A/3AmMO/ | |
| Unmodified B₀ | /5IAbRQ/TA CAG GAT GCT TGC CAC | SEQ ID NO: 4 |
| | AAA CAC CAT TGT CAC TCT CCA | |
| Unmodified B₃ | /5IAbRQ/TA CAG GAT GCT TGC AAA | SEQ ID NO: 5 |
| | CAC CAT TGT CAC TCT CCA | |
| Unmodified B₅ | /5IAbRQ/TA CAG GAT GCT CAA | SEQ ID NO: 6 |
| | ACA CCA TTG TCA CTC TCC A | |
| Unmodified B₇ | /5IAbRQ/TA CAG GAT GCA AAC | SEQ ID NO: 7 |
| | ACC ATT GTC ACT CTC CA | |
| Unmodified E₃ | /5IAbRQ/AG GAT GCT TGC CAC | SEQ ID NO: 8 |
| | AAA 5IAbRQCAT TGT CAC TCT CCA | |
| Unmodified E₅ | /5IAbRQ/GA TGC TTG CCA CAA | SEQ ID NO: 9 |
| | ACA CCA TTG TCA CTC TCC A | |
| Unmodified E₇ | /5IAbRQ/TG CTT GCC ACA AAC | SEQ ID NO: 10 |
| | ACC ATT GTC ACT CTC CA | |

[0108] Transfection experiments in HeLa cells showed that PS/LNA chemical modification of the locking strand was needed for maintaining the ASO in the inactive state. HeLa cells do not express miR-122. As a result, all the unmodified locking strands B0, B3, and B5 failed to inhibit ASO activity as measured by RT-qPCR and using the luciferase reporter cell line. Importantly, incorporating locking strands with the PS and LNA modifications (see table 2) showed substantial improvement, resulting in dampened knockdown of HIF1α as measured by RT-qPCR and the luciferase reporter (FIGS. 3B and 3C). Given that the Tm of B0 and B0* against the pM-EZN strands are similar, this indicates that the differential response is not driven by thermodynamic difference between the conventional nucleobases and the PS/LNA nucleic acids.

TABLE 2
Oligonucleotide sequences for in vitro testing of conditional EZN2968. “+” = LNA
modification; “*” = PS modification; /3AmMO/ = 3′ amino modification;
“T” indicates a mismatch on the toehold binding region.

| | Sequence | ID |
|---|---|---|
| EZN2968 | +T*+G*+G* C*A*A* G*C*A* T*C*C* +T*+G*+T* A | SEQ ID NO: 11 |
| EZN3088 | *C*+G*+T* C*A*G* T*A*T* G*C*G* +A*+A*+T* C | SEQ ID NO: 12 |
| Modified pM₁₂-EZN | C*A*A* T*G*G* T*G*T* T*T*G* +T*G*+G* C*A*A* G*C*A* | SEQ ID NO: 1 |
| | T*C*C* +T*+G*+T* A/3AmMO/ | |
| Modified pM/₁₅-EZN | T*G*A* C*A*A* T*G*G* T*G*T* T*T*G* +T*+G*+G* C*A*A* | SEQ ID NO: 2 |
| | G*C*A* T*C*C* +T*+G*+T* A/3AmMO/ | |
| Modified B₆ (B₆*) | /5IAbRQ/+T*+A* +C*A*G* G*A*T* G*C*T* T*G*C* C*A*C* | SEQ ID NO: 13 |
| | A*A*A* C*A*C* C*A*T* T*G*+T* +C*+A*C* A*C*T* C*C*A | |
| Modified B₃ (B₃*) | /5IAbRQ/*T*A* C*A*G* G*A*T* G*C*++T* +T*+G*+C* | SEQ ID NO. 14 |
| | +A*A*A* C*A*C* C*A*T* T*G*T* C*A*C* A*C*T* C*C*A | |
| Modified B₅ (B₅*) | /5IAbRQ/*T*A* C*A*G* G*A*T* +G*+C*+T* +C*+A*+A* | SEQ ID NO: 15 |
| | A*C*A*C*C*A* T*T*G* T*C*A* C*T*C* T*C*C* A | |
| B₃* without | /5IAbRQ/T*A* C*A*G* G*A*T* G*C*+T* +T*+G*+C* | SEQ ID NO: 16 |
| toehold | +A ** A*A* C*A*C* C*A*T* T*G*T* C*A | |
| miR-122 mimic | +T*G*G* +A*G*T* +G*T*G* +A*C*A* +A*T*G* +G*I*G* | SEQ ID NO: 17 |
| | +T*T*T* +G | |
| Scrambled miR-122 | +G*A*A*+G*T*A*+T*G*T*+G*G*T*+G*A*T*+T*G*C*+G*T* | SEQ ID NO: 18 |
| | G*+T | |
| Scr. 1-7nt | +G*G*G*+T*T*G*+A*T*G*+A*C*A*+A*T*G*+G*T*G*+T*T* | SEQ ID NO: 19 |
| miR-122 | T*+G | |

[0109] The failure in locking efficacy by unmodified locking strands may be due to their nuclease susceptibility, which leads to degradation of the locking strands and the spontaneous activation of pM-EZN strand. To test this, HeLa cells were transfected with pM15-EZN duplexes labeled with Cy5 and quencher pair and measured the cell-associated fluorescence by flow cytometry. Cells transfected with pM15-EZN duplexes with unmodified locking strands (T7B0, T7B3, T7B5) resulted in similar and even slightly higher levels of fluorescence intensity compared to single-stranded pM15-EZN alone transfected cells, indicating complete dissociation of the locking strand and pM15-EZN strand. The slightly higher level of fluorescence intensity was consistent with the higher HIF1α knockdown efficacy by the duplexes with unmodified locks compared to pM15-EZN only group. This may be due to higher transfection efficiency of double stranded DNA compared to single stranded DNA in HeLa cells. In contrast, pM15-EZN duplexes with modified locking strands (T7B0*, T7B3*, T7B5*) resulted in reduced fluorescence intensity compared to the pM15-EZN only group, showing that the duplexes remain primarily locked (hybridized) 24 h after transfection (FIG. 3D).

[0110] The experiments conducted using HeLa (lacking miR-122) also showed that increasing bulge size decreases the thermodynamic stability of the duplex as measured by Tm (FIG. 3A) and increased the level of spontaneous activation of the conditional ASO. T7B3* did not knockdown HIF1α, whereas T10B3* knocked down HIF1α significantly, indicating that the length of toehold and branch migration domain also plays an important role in the spontaneous leakage.

[0111] The conclusions that chemical modification of the locking strand and stable binding to the ASO (Tm>58° C.) are important to inhibit EZN2968 were further validated in U373 cells, lacking miR-122 expression, by both RT-qPCR and Western Blot analysis. T10B0*, T7B0* and T7B3* duplexes were used for testing miR-122 induced HIF1α knockdown because of low spontaneous activation.

Synthetic miR-122 Mimic Triggers Activation of Conditional EZN2968 In Vitro

[0112] Experiments were performed to determine whether conditional EZN2968 could be activated in vitro by using an exogenously transfected miR-122 mimicking oligonucleotide (miR-122 mimic, table 2). For this purpose, the cells were co-transfected with the conditional EZN2968 along with the miR-122 mimic in U373 cells. To minimize the complexity of the experiment, the transfection mixture of the conditional EZN2968 duplex (T7B0* or T7B3*) and miR-122 mimic separately was prepared with Oligofectamine™. The two solutions were added to cells simultaneously. After 24 h incubation, 10 nM T7B3* alone did not show significant down regulation of HIF1α mRNA, whereas 10 nM T7B3* co-transfected with 500 nM miR-122 mimic down regulated HIF1α mRNA by ˜50% (FIG. 4A). In contrast, T7B0*, which has no bulge and higher thermodynamic stability, did not knockdown HIF1α mRNA in these conditions. These results indicate completely locked duplexes without a bulge render low miR-122 sensitivity, and the destabilization of the duplex is necessary for enhancing miR-122 sensitivity. Co-transfection of T7B3* and miR-122 mimic down regulated HIF1α protein levels in U373 cells after 24 h incubation (FIGS. 4B and 4C). It should be noted that the conclusions are time dependent, and when the incubation time was extended to 48 h, T7B3* showed more spontaneous knockdown of HIF1α mRNA, and T7B0* showed significant miR-122-triggered activation.

[0113] Given the miR-122 sensitivity of T7B3*, its dose-dependent response to miR-122 was quantified. HIF1α mRNA levels decreased with increasing miR-122 concentrations in a dose-dependent manner (FIG. 4D). Although miR-122 concentrations of 1-500 nM were tested, only when the miR-122 mimic concentration was above 100 nM, did T7B3* show significant knockdown of HIF1α.

[0114] In order to validate that ASO activation is driven through toehold-mediated strand displacement, a T7B3* with its toehold domain truncated we created. After co-transfection with miR-122 mimic, T7B3* lacking the toehold showed a dampened and not statistically significant knockdown of HIF1α mRNA, in contrast to T7B3* with the toehold (FIG. 4E). This knockdown is likely caused by displacement that is not mediated by the toehold over the 24 h duration of the experiment. In addition, T7B3* were co-transfected with miR-122 mimic or a miR-122 sequence with a scrambled toehold-binding domain (1-7nt from 5′ end). The scr. 1-7nt miR-122 did not trigger significant HIF1α knockdown (FIG. 4F). These results demonstrate that toehold binding facilitates the activation of the conditional EZN2968, both thermodynamically (because of weaker binding between the scr. 1-7nt miR-122 and locking strand) and kinetically (through acceleration of the displacement reaction).

Activation of Conditional EZN2968 is Specific to miR-122

[0115] In order to test specificity of conditional EZN2968 activation in response to miR-122 sequence, two scrambled miR-122 sequences were used: one that is completely scrambled, the other with the scrambled toehold binding domain at 1-7 nt of miR-122. Each of these miRNA sequences were co-transfected with conditional ASO T7B3* in U373 cells. The T7B3* duplex was dual labelled with a Cy5 at the 3′ end of the pM15-EZN strand and a quencher on the 5′ end of the B3* strand (FIG. 5A). These labels generate a turn-on fluorescence response upon separation of the conditional ASO and provide a readout of displacement. After 24 h incubation with the miR-122 mimic (500 nM) along with T7B3* (10 nM), the cell-associated fluorescence was measured using flow cytometry. The results showed that the fluorescence of U373 cells showed the largest increase compared to T7B3* alone transfected cells, whereas U373 cells co-transfected with T7B3* and scrambled miR-122 or scrambled 1-7 nt miR-122 showed weaker fluorescence (FIG. 5B). Indeed, the cells co-transfected with T7B3* and miR-122 showed fluorescence levels on par with that of the Cy-5 tagged ASO (pM15-EZN), which confirms miR-122 driven unlocking of the ASO.

[0116] To further validate the fluorescence intensity-based assay, the fluorescence lifetime of the Cy5/quencher tagged T7B3* was measured, confirming the specificity of miRNA-inducible ASO activation (FIG. 5A). Fluorescence lifetime measurements provide a concentration-independent readout of the fluorophore local environment and have been used to quantify FRET efficiency of biosensors in cells. In PBS, Cy5 tagged pM15-EZN strands showed an amplitude-averaged lifetime (TAV Amp) of 1.7 ns and an intensity-averaged lifetime (TAV Int) of 1.9 ns; whereas after the pM15-EZN strand was hybridized to locking strand B3* tagged with quencher (Q), TAV Amp and TAV Int of Cy5 decreased to 0.4 ns and 0.7 ns, respectively. After incubation of 10 nM Cy5-Q pair labeled T7B3* with 500 nM miR-122 mimic, TAV Amp and TAV Int increased to 0.9 ns and 1.5 ns. However, the fluorescence lifetime of T7B3* with scrambled miR-122 and scr. 1-7nt miR-122 showed only slight increase compared to T7B3* alone group, which is probably due to non-specific binding of the miRNA mimics to the T7B3*.

[0117] Next, U373 cells were co-transfected with T7B3* and miR-122 mimic or scrambled miRNA triggers. After 24 h, fluorescence lifetime imaging microscopy (FLIM) was conducted on the cells to measure Cy5 fluorescence lifetime within cells. pM15-EZN-Cy5 and T7B3* labeled with only Cy5 but not Q were also transfected as positive controls. As shown in FIGS. 5C and 5D, cells co-transfected with T7B3* and miR-122 mimics showed a significant increase of Cy5 fluorescence lifetime compared to the T7B3* only group, whereas cells co-transfected with T7B3* and completely scrambled miR-122 or scrambled 1-7nt miR-122 did not show an increase in fluorescence lifetime. Together, these results confirm that dequenching of Cy5 is caused by separation of the pM15-EZN and locking strand B3* and this response is specifically triggered by miR-122 and mediated by the toehold domain.

Endogenous miR-122 Induces HIF1α Knockdown by Conditional EZN2968

[0118] As it is unpredictable whether the miR-122 mimic reproduces the properties of cellular miR-122, experiments were performed to determine whether endogenous miR-122 could induce HIF1α knockdown by T7B3*. T7B3* were transfected into Huh7 cells, a hepatocellular carcinoma cell line that express high levels of miR-122. T7B3* knocked down HIF1α mRNA by ˜40%, whereas T7B3* with the toehold truncated did not show significant knockdown of HIF1α mRNA, suggesting that the activation by endogenous miR-122 proceeds through the intended toehold-mediated strand displacement mechanism (FIG. 6A).

[0119] Next, experiments were performed to determine whether sponging of endogenous miR-122 could prevent the activation of T7B3*. T7B3* was co-transfected with excess amounts of locking strand B3* to compete for endogenous miR-122 binding to T7B3*. The result showed that there was no HIF1α knockdown in these co-transfected groups (FIG. 6B). This was further confirmed by miR-122 knockdown experiments in Huh7 cells treated with different concentrations of commercially available anti-miR-122. With increasing concentration of anti-miR-122, the HIF1α knockdown efficacy of T7B3* in Huh7 cells was reduced with complete inhibition of conditional ASO activity at 500 nM anti-miR-122 concentration (FIG. 6C). Together, these data indicate that the conditional EZN2968 activity is induced by endogenous miR-122 and depends on miR-122 expression levels in the cells.

[0120] In principle, the conditional EZN2968 design is modular and one could engineer responses to virtually any miRNA trigger. To test the modular design concept, a miR-21-inducible EZN2968 was created with the same toehold length and bulge size as miR-122 inducible T7B3*.

TABLE 3
Oligonucleotide sequences for
miR-21-inducible EZN2968,
“+” = LNA modification;
“*” = PS modification;
/3AmMO/ = 3′ amino modification

| ID | Sequence |
|---|---|
| pMI-EZN | T*C*A* G*A*C* T*G*A* |
| for | T*G*T* T*G*A* +T*+G*+G* |
| miR-21- | C*A*A* G*C*A* T*C*C* |
| inducible | +T*+G*+T* A/3AmMO/ |
| EZN2968 | SEQ ID NO: 2674 |
| B₃* for | /5IAbRQ/*T*A* C*A*G* |
| miR-21- | G*A*T* G*C*+T* +T*+G*+T* |
| inducible | +C*+A*A* C*A*T* C*A*G* |
| EZN2968 | T*C*T* G*A*T* A*A*G* |
| | C*T*A |
| | SEQ ID NO: 2675 |

[0121] This duplex was transfected into U373 cells, which express high levels of miR-21. miR-21-inducible T7B3* showed a significant knockdown of HIF1α, while the miR-122-inducible T7B3* did not (FIG. 6D). Thus, by simply changing the miRNA sequence in the extended EZN2968 ASO and the miRNA-complementary sequence in the locking strand, it was possible to generate another conditional EZN2968 ASO triggered by endogenous miR-21. Flow cytometry further showed that cells transfected with fluorophore-quencher labeled miR-21-inducible duplex showed slightly higher fluorescence compared to the miR-122-inducible counterpart, suggesting displacement of the duplex triggered by miR-21. The small differences in fluorescence intensity between miR-21 and miR-122-inducible duplexes may suggest that the down regulation of HIF1α by miR-21-inducible ASO is caused by a small fraction of ASOs that are activated. These results demonstrate the concept of the miRNA-inducible, modular conditional ASO therapeutics, which can be rapidly designed and synthesized based on the disease- or cell-specific miRNAs.

[0122] Most ASOs are 16 nts long while most miRNAs are 22 nt, and accordingly, conditional ASOs can be adapted to other specific targets. In principle, conditional ASOs can be engineered to trigger inhibition of any mRNA using other specific miRNA triggers. This concept was further supported by adapting the conditional EZN2968 ASO design to miR-21, showing that miR-21-inducible EZN2968 knocked down HIF1α in cells expressing high levels of miR-21. This miR-21-inducible HIF1α inhibitor could be a potential therapeutic for cancer, given the high expression level and significant roles of miR-21 and HIF1α in cancer development.

The application's sequence listing, which the Patent Office published only in electronic form, follows.

SEQUENCE LISTING (2675 sequences)

SEQ ID NO: 1 - DNA, 27 bp, synthetic construct
  source 1..27: mol_type = other DNA
caatggtgtttgtggcaagcatcctgt

SEQ ID NO: 2 - DNA, 30 bp, synthetic construct
  source 1..30: mol_type = other DNA
tgacaatggtgtttgtggcaagcatcctgt

SEQ ID NO: 3 - DNA, 33 bp, synthetic construct
  source 1..33: mol_type = other DNA
gtgtgacaatggtgtttgtggcaagcatcctgt

SEQ ID NO: 4 - DNA, 38 bp, synthetic construct
  source 1..38: mol_type = other DNA
tacaggatgcttgccacaaacaccattgtcactctcca

SEQ ID NO: 5 - DNA, 35 bp, synthetic construct
  source 1..35: mol_type = other DNA
tacaggatgcttgcaaacaccattgtcactctcca

SEQ ID NO: 6 - DNA, 31 bp, synthetic construct
  source 1..31: mol_type = other DNA
tacaggatgctcaaaccattgtcactctcca

SEQ ID NO: 7 - DNA, 29 bp, synthetic construct
  source 1..29: mol_type = other DNA
tacaggatgcaaaccattgtcactctcca

SEQ ID NO: 8 - DNA, 35 bp, synthetic construct
  source 1..35: mol_type = other DNA
aggatgcttgccacaaacaccattgtcactctcca

SEQ ID NO: 9 - DNA, 33 bp, synthetic construct
  source 1..33: mol_type = other DNA
gatgcttgccacaaacaccattgtcactctcca

SEQ ID NO: 10 - DNA, 31 bp, synthetic construct
  source 1..31: mol_type = other DNA
tgcttgccacaaacaccattgtcactctcca

SEQ ID NO: 11 - DNA, 16 bp, synthetic construct
  source 1..16: mol_type = other DNA
tggcaagcatcctgta

SEQ ID NO: 12 - DNA, 15 bp, synthetic construct
  source 1..15: mol_type = other DNA
cgtcagatgcgaatc

SEQ ID NO: 13 - DNA, 38 bp, synthetic construct
  source 1..38: mol_type = other DNA
tacaggatgcttgccacaaacaccattgtcacactcca

SEQ ID NO: 14 - DNA, 35 bp, synthetic construct
  source 1..35: mol_type = other DNA
tacaggatgcttgcaaacaccattgtcacactcca

SEQ ID NO: 15 - DNA, 33 bp, synthetic construct
  source 1..33: mol_type = other DNA
tacaggatgctcaaacaccattgtcactctcca

SEQ ID NO: 16 - DNA, 28 bp, synthetic construct
  source 1..28: mol_type = other DNA
tacaggatgcttgcaaacaccattgtca

SEQ ID NO: 17 - DNA, 22 bp, synthetic construct
  source 1..22: mol_type = other DNA
tggagtgtgacaatggtgtttg

SEQ ID NO: 18 - DNA, 22 bp, synthetic construct
  source 1..22: mol_type = other DNA
gaagtatgtggtgattgcgtgt

SEQ ID NO: 19 - DNA, 22 bp, synthetic construct
  source 1..22: mol_type = other DNA
gggttgatgacaatggtgtttg

SEQ ID NO: 20 - RNA, 22 nt, synthetic construct
  source 1..22: mol_type = other RNA
aagatgtggaaaaattggaatc

SEQ ID NO: 21 - RNA, 22 nt, synthetic construct
  source 1..22: mol_type = other RNA
cagtggttttaccctatggtag

SEQ ID NO: 22 - RNA, 22 nt, synthetic construct
  source 1..22: mol_type = other RNA
ctctagagggaagcgctttctg

SEQ ID NO: 23 - RNA, 22 nt, synthetic construct
  source 1..22: mol_type = other RNA
ttcattcggctgtccagatgta

SEQ ID NO: 24 - RNA, 22 nt, synthetic construct
  source 1..22: mol_type = other RNA
tttggtccccttcaaccagctg

SEQ ID NO: 25 - RNA, 21 nt, synthetic construct
  source 1..21: mol_type = other RNA
tttctgtcttttctggtccag

SEQ ID NO: 26 - RNA, 23 nt, synthetic construct
  source 1..23: mol_type = other RNA
gtttgcacgggtgggccttgtct

SEQ ID NO: 27 - RNA, 22 nt, synthetic construct
  source 1..22: mol_type = other RNA
aaagaccgtgactacttttgca

SEQ ID NO: 28 - RNA, 24 nt, synthetic construct
  source 1..24: mol_type = other RNA
tgggcgaggggtgggctctcagag

SEQ ID NO: 29 - RNA, 24 nt, synthetic construct
  source 1..24: mol_type = other RNA
cagggctcagggattggatggagg

SEQ ID NO: 30 - RNA, 20 nt, synthetic construct
  source 1..20: mol_type = other RNA
accaggaggctgaggcccct

SEQ ID NO: 31 - RNA, 21 nt, synthetic construct
  source 1..21: mol_type = other RNA
tcacctgagctcccgtgcctg

SEQ ID NO: 32 - RNA, 21 nt, synthetic construct
  source 1..21: mol_type = other RNA
agaaggcctttccatctctgt

SEQ ID NO: 33 - RNA, 21 nt, synthetic construct
  source 1..21: mol_type = other RNA
acggtgctggatgtggccttt

SEQ ID NO: 34 - RNA, 22 nt, synthetic construct
  source 1..22: mol_type = other RNA
caggcacgggagctcaggtgag

SEQ ID NO: 35 - RNA, 22 nt, synthetic construct
  source 1..22: mol_type = other RNA
tatacaagggcaagctctctgt

SEQ ID NO: 36 - RNA, 23 nt, synthetic construct
  source 1..23: mol_type = other RNA
ttgaagaggaggtgctctgtagc

SEQ ID NO: 37 - RNA, 23 nt, synthetic construct
  source 1..23: mol_type = other RNA
cgaggggtagaagagcacagggg

SEQ ID NO: 38 - RNA, 22 nt, synthetic construct
  source 1..22: mol_type = other RNA
cttagcaggttgtattatcatt

SEQ ID NO: 39 - RNA, 21 nt, synthetic construct
  source 1..21: mol_type = other RNA
ttcaacaagggtgtaggatgg

SEQ ID NO: 40 - RNA, 23 nt, synthetic construct
  source 1..23: mol_type = other RNA
cagttctgctgttctgactctag

SEQ ID NO: 41 - RNA, 22 nt, synthetic construct
  source 1..22: mol_type = other RNA
ttgcatatgtaggatgtcccat

SEQ ID NO: 42 - RNA, 23 nt, synthetic construct
  source 1..23: mol_type = other RNA
atggccaaaactgcagttatttt

SEQ ID NO: 43 - RNA, 24 nt, synthetic construct
  source 1..24: mol_type = other RNA
ttctccaaaagaaagcactttctg

SEQ ID NO: 44 - RNA, 19 nt, synthetic construct
  source 1..19: mol_type = other RNA
taaggagggggatgagggg

SEQ ID NO: 45 - RNA, 20 nt, synthetic construct
  source 1..20: mol_type = other RNA
gtgggttggggcgggctctg

SEQ ID NO: 46 - RNA, 22 nt, synthetic construct
  source 1..22: mol_type = other RNA
caggtcgtcttgcagggcttct

SEQ ID NO: 47 - RNA, 23 nt, synthetic construct
  source 1..23: mol_type = other RNA
agcttctttacagtgctgccttg

SEQ ID NO: 48 - RNA, 23 nt, synthetic construct
  source 1..23: mol_type = other RNA
agtagagaggaaaagttagggtc

SEQ ID NO: 49 - RNA, 22 nt, synthetic construct
  source 1..22: mol_type = other RNA
agggccgaagggtggaagctgc

SEQ ID NO: 50 - RNA, 21 nt, synthetic construct
  source 1..21: mol_type = other RNA
catctgggcaactgactgaac

SEQ ID NO: 51 - RNA, 21 nt, synthetic construct
  source 1..21: mol_type = other RNA
ccaggctctgcagtgggaact

SEQ ID NO: 52 - RNA, 22 nt, synthetic construct
  source 1..22: mol_type = other RNA
ctacttctacctgtgttatcat

SEQ ID NO: 53 - RNA, 21 nt, synthetic construct
  source 1..21: mol_type = other RNA
gtgggatttctgagtagcatc

SEQ ID NO: 54 - RNA, 19 nt, synthetic construct
  source 1..19: mol_type = other RNA
aagtgtgcagggcactggt

SEQ ID NO: 55 - RNA, 22 nt, synthetic construct
  source 1..22: mol_type = other RNA
actgttgctaatatgcaactct

SEQ ID NO: 56 - RNA, 22 nt, synthetic construct
  source 1..22: mol_type = other RNA
agtttgggatggagagaggaga

SEQ ID NO: 57 - RNA, 22 nt, synthetic construct
  source 1..22: mol_type = other RNA
attggggacattttgcattcat

SEQ ID NO: 58 - RNA, 20 nt, synthetic construct
  source 1..20: mol_type = other RNA
tccccaacccctgcccgcag

SEQ ID NO: 59 - RNA, 25 nt, synthetic construct
  source 1..25: mol_type = other RNA
aaaggattctgctgtcggtcccact

SEQ ID NO: 60 - RNA, 22 nt, synthetic construct
  source 1..22: mol_type = other RNA
tcacctgacctcccatgcctgt

SEQ ID NO: 61 - RNA, 20 nt, synthetic construct
  source 1..20: mol_type = other RNA
tctcttcatctaccccccag

SEQ ID NO: 62 - RNA, 20 nt, synthetic construct
  source 1..20: mol_type = other RNA
taaagagccctgtggagaca

SEQ ID NO: 63 - RNA, 22 nt, synthetic construct
  source 1..22: mol_type = other RNA
agcagtgtttgttttgcccaca

SEQ ID NO: 64 - RNA, 22 nt, synthetic construct
  source 1..22: mol_type = other RNA
tctgcaagtgtcagaggcgagg

SEQ ID NO: 65 - RNA, 21 nt, synthetic construct
  source 1..21: mol_type = other RNA
cacagcaagtgtagacaggca

SEQ ID NO: 66 - RNA, 23 nt, synthetic construct
  source 1..23: mol_type = other RNA
tggggaaggcttggcagggaaga

SEQ ID NO: 67 - RNA, 24 nt, synthetic construct
  source 1..24: mol_type = other RNA
ggtgggatggagagaaggtatgag

SEQ ID NO: 68 - RNA, 22 nt, synthetic construct
  source 1..22: mol_type = other RNA
ccacctcccctgcaaacgtcca

SEQ ID NO: 69 - RNA, 22 nt, synthetic construct
  source 1..22: mol_type = other RNA
aaagtgcatccttttagaggtt

SEQ ID NO: 70 - RNA, 22 nt, synthetic construct
  source 1..22: mol_type = other RNA
gtgacatcacatatacggcagc

SEQ ID NO: 71 - RNA, 21 nt, synthetic construct
  source 1..21: mol_type = other RNA
atcacattgccagggatttcc

SEQ ID NO: 72 - RNA, 20 nt, synthetic construct
  source 1..20: mol_type = other RNA
ctgtatgccctcaccgctca

SEQ ID NO: 73 - RNA, 23 nt, synthetic construct
  source 1..23: mol_type = other RNA
ttgtggggttggagagctggctg

SEQ ID NO: 74 - RNA, 22 nt, synthetic construct
  source 1..22: mol_type = other RNA
ctggactgagccgtgctactgg

SEQ ID NO: 75 - RNA, 22 nt, synthetic construct
  source 1..22: mol_type = other RNA
ttggggaaacggccgctgagtg

SEQ ID NO: 76 - RNA, 21 nt, synthetic construct
  source 1..21: mol_type = other RNA
tcactcctctcctcccgtctt

SEQ ID NO: 77 - RNA, 22 nt, synthetic construct
  source 1..22: mol_type = other RNA
tttcttcttagacatggcaacg

SEQ ID NO: 78 - RNA, 22 nt, synthetic construct
  source 1..22: mol_type = other RNA
tacccagagcatgcagtgtgaa

SEQ ID NO: 79 - RNA, 22 nt, synthetic construct
  source 1..22: mol_type = other RNA
tgagaactgaattccatgggtt

SEQ ID NO: 80 - RNA, 23 nt, synthetic construct
  source 1..23: mol_type = other RNA
tggagtccaggaatctgcatttt

SEQ ID NO: 81 - RNA, 21 nt, synthetic construct
  source 1..21: mol_type = other RNA
cacacacacacacacacgtat

SEQ ID NO: 82 - RNA, 19 nt, synthetic construct
  source 1..19: mol_type = other RNA
aggttgacatacgtttccc

SEQ ID NO: 83 - RNA, 22 nt, synthetic construct
  source 1..22: mol_type = other RNA
atcgggaatgtcgtgtccgccc

SEQ ID NO: 84 - RNA, 22 nt, synthetic construct
  source 1..22: mol_type = other RNA
ttgtggctggtcatgaggctaa

SEQ ID NO: 85 - RNA, 23 nt, synthetic construct
  source 1..23: mol_type = other RNA
atgagactcatgtaaaacatctt

SEQ ID NO: 86 - RNA, 21 nt, synthetic construct
  source 1..21: mol_type = other RNA
ctatacaatctactgtctttc

SEQ ID NO: 87 - RNA, 24 nt, synthetic construct
  source 1..24: mol_type = other RNA
aatttggtttctgaggcacttagt

SEQ ID NO: 88 - RNA, 21 nt, synthetic construct
  source 1..21: mol_type = other RNA
actaaatgtcaaacatattct

SEQ ID NO: 89 - RNA, 18 nt, synthetic construct
  source 1..18: mol_type = other RNA
agggggcgggctccggcg

SEQ ID NO: 90 - RNA, 23 nt, synthetic construct
  source 1..23: mol_type = other RNA
aaagcaaatgttgggtgaacggc

SEQ ID NO: 91 - RNA, 23 nt, synthetic construct
  source 1..23: mol_type = other RNA
agtggatgatggagactcggtac

SEQ ID NO: 92 - RNA, 21 nt, synthetic construct
  source 1..21: mol_type = other RNA
agtggcaaagtctttccatat

SEQ ID NO: 93 - RNA, 22 nt, synthetic construct
  source 1..22: mol_type = other RNA
cctcccacacccaaggcttgca

SEQ ID NO: 94 - RNA, 22 nt, synthetic construct
  source 1..22: mol_type = other RNA
agggaaggaggcttggtcttag

SEQ ID NO: 95 - RNA, 21 nt, synthetic construct
  source 1..21: mol_type = other RNA
aaccttggcccctctccccag

SEQ ID NO: 96 - RNA, 21 nt, synthetic construct
  source 1..21: mol_type = other RNA
tgaggagatcgtcgaggttgg

SEQ ID NO: 97 - RNA, 22 nt, synthetic construct
  source 1..22: mol_type = other RNA
gtgaggaggggctggcagggac

SEQ ID NO: 98 - RNA, 24 nt, synthetic construct
  source 1..24: mol_type = other RNA
caaaggccacattctcctgtgcac

SEQ ID NO: 99 - RNA, 21 nt, synthetic construct
  source 1..21: mol_type = other RNA
tctcagtaagtggcactctgt

SEQ ID NO: 100 - RNA, 22 nt, synthetic construct
  source 1..22: mol_type = other RNA
ctctctactgacttgcaacata

SEQ ID NO: 101 - RNA, 21 nt, synthetic construct
  source 1..21: mol_type = other RNA
actcggctgcggtggacaagt

SEQ ID NO: 102 - RNA, 18 nt, synthetic construct
  source 1..18: mol_type = other RNA
tgggagctggactacttc

SEQ ID NO: 103 - RNA, 21 nt, synthetic construct
  source 1..21: mol_type = other RNA
ttccttctgttgtctgtgcag

SEQ ID NO: 104 - RNA, 22 nt, synthetic construct
  source 1..22: mol_type = other RNA
cagttatcacagtgctgatgct

SEQ ID NO: 105 - RNA, 21 nt, synthetic construct
  source 1..21: mol_type = other RNA
aggtagaatgaggcctgacat

SEQ ID NO: 106 - RNA, 21 nt, synthetic construct
  source 1..21: mol_type = other RNA
aaaaactgtgattacttttgc

SEQ ID NO: 107 - RNA, 21 nt, synthetic construct
  source 1..21: mol_type = other RNA
caaacccctgtctacccgcag

SEQ ID NO: 108 - RNA, 21 nt, synthetic construct
  source 1..21: mol_type = other RNA
tcctgtccctgtctcctacag

SEQ ID NO: 109 - RNA, 27 nt, synthetic construct
  source 1..27: mol_type = other RNA
accttcttgtataagcactgtgctaaa

SEQ ID NO: 110 - RNA, 17 nt, synthetic construct
  source 1..17: mol_type = other RNA
gagactggggtggggcc

SEQ ID NO: 111 - RNA, 20 nt, synthetic construct
  source 1..20: mol_type = other RNA
cagggggactgggggtgagc

SEQ ID NO: 112 - RNA, 21 nt, synthetic construct
  source 1..21: mol_type = other RNA
cgcctgcccagccctcctgct

SEQ ID NO: 113 - RNA, 19 nt, synthetic construct
  source 1..19: mol_type = other RNA
agcagggctggggattgca

SEQ ID NO: 114 - RNA, 18 nt, synthetic construct
  source 1..18: mol_type = other RNA
acgttggctctggtggtg

SEQ ID NO: 115 - RNA, 22 nt, synthetic construct
  source 1..22: mol_type = other RNA
tcgcggtttgtgccagatgacg

SEQ ID NO: 116 - RNA, 20 nt, synthetic construct
  source 1..20: mol_type = other RNA
gctcggactgagcaggtggg

SEQ ID NO: 117 - RNA, 23 nt, synthetic construct
  source 1..23: mol_type = other RNA
tctgcactgtgagttggctggct

SEQ ID NO: 118 - RNA, 19 nt, synthetic construct
  source 1..19: mol_type = other RNA
gagccagttggacaggagc

SEQ ID NO: 119 - RNA, 22 nt, synthetic construct
  source 1..22: mol_type = other RNA
tgagtattacatggccaatctc

SEQ ID NO: 120 - RNA, 20 nt, synthetic construct
  source 1..20: mol_type = other RNA
aaaagctgggttgagagggt

SEQ ID NO: 121 - RNA, 22 nt, synthetic construct
  source 1..22: mol_type = other RNA
ttgtctcttgttcctcacacag

SEQ ID NO: 122 - RNA, 24 nt, synthetic construct
  source 1..24: mol_type = other RNA
tgcctgggtctctggcctgcgcgt

SEQ ID NO: 123 - RNA, 21 nt, synthetic construct
  source 1..21: mol_type = other RNA
tccctacccctccactcccca

SEQ ID NO: 124 - RNA, 25 nt, synthetic construct
  source 1..25: mol_type = other RNA
aggagggaaggggctgagaacagga

SEQ ID NO: 125 - RNA, 23 nt, synthetic construct
  source 1..23: mol_type = other RNA
tgtttcggggctcatggcctgtg

SEQ ID NO: 126 - RNA, 23 nt, synthetic construct
  source 1..23: mol_type = other RNA
ggcaggagggctgtgccaggttg

SEQ ID NO: 127 - RNA, 22 nt, synthetic construct
  source 1..22: mol_type = other RNA
ctattaaggacatttgtgattc

SEQ ID NO: 128 - RNA, 22 nt, synthetic construct
  source 1..22: mol_type = other RNA
ccacgtgcttctctttccgcag

SEQ ID NO: 129 - RNA, 21 nt, synthetic construct
  source 1..21: mol_type = other RNA
caaaacgtgaggcgctgctat

SEQ ID NO: 130 - RNA, 22 nt, synthetic construct
  source 1..22: mol_type = other RNA
aacatcactgcaagtcttaaca

SEQ ID NO: 131 - RNA, 24 nt, synthetic construct
  source 1..24: mol_type = other RNA
aaatatatatatatatgtacgtat

SEQ ID NO: 132 - RNA, 23 nt, synthetic construct
  source 1..23: mol_type = other RNA
gtgagtgggagccccagtgtgtg

SEQ ID NO: 133 - RNA, 22 nt, synthetic construct
  source 1..22: mol_type = other RNA
atctaaatgcagcatgccagtc

SEQ ID NO: 134 - RNA, 21 nt, synthetic construct
  source 1..21: mol_type = other RNA
gttcctgctgaactgagccag

SEQ ID NO: 135 - RNA, 21 nt, synthetic construct
  source 1..21: mol_type = other RNA
tcaataaatgtctgttgaatt

SEQ ID NO: 136 - RNA, 23 nt, synthetic construct
  source 1..23: mol_type = other RNA
tcagcattcattggcaccagaga

SEQ ID NO: 137 - RNA, 21 nt, synthetic construct
  source 1..21: mol_type = other RNA
gcaggacaggcagaagtggat

SEQ ID NO: 138 - RNA, 19 nt, synthetic construct
  source 1..19: mol_type = other RNA
cggcgcgaccggcccgggg

SEQ ID NO: 139 - RNA, 24 nt, synthetic construct
  source 1..24: mol_type = other RNA
tctgcaggtcctggtgaacgccat

SEQ ID NO: 140 - RNA, 24 nt, synthetic construct
  source 1..24: mol_type = other RNA
tgggctaagggagatgattgggta

SEQ ID NO: 141 - RNA, 21 nt, synthetic construct
  source 1..21: mol_type = other RNA
ggggggatgtgcatgctggtt

SEQ ID NO: 142 - RNA, 22 nt, synthetic construct
  source 1..22: mol_type = other RNA
tttaacatgggggtacctgctg

SEQ ID NO: 143 - RNA, 21 nt, synthetic construct
  source 1..21: mol_type = other RNA
cggggcagctcagtacaggat

SEQ ID NO: 144 - RNA, 22 nt, synthetic construct
  source 1..22: mol_type = other RNA
tggcagtgtattgttagctggt

SEQ ID NO: 145 - RNA, 24 nt, synthetic construct
  source 1..24: mol_type = other RNA
agggctggactcagcggcggagct

SEQ ID NO: 146 - RNA, 22 nt, synthetic construct
  source 1..22: mol_type = other RNA
tgagtgattgatagctatgttc

SEQ ID NO: 147 - RNA, 22 nt, synthetic construct
  source 1..22: mol_type = other RNA
tcagcaggcaggctggtgcagc

SEQ ID NO: 148 - RNA, 22 nt, synthetic construct
  source 1..22: mol_type = other RNA
aatcgtacagggtcatccactt

SEQ ID NO: 149 - RNA, 22 nt, synthetic construct
  source 1..22: mol_type = other RNA
actccagccccacagcctcagc

SEQ ID NO: 150 - RNA, 21 nt, synthetic construct
  source 1..21: mol_type = other RNA
tccagggagacagtgtgtgag

SEQ ID NO: 151 - RNA, 23 nt, synthetic construct
  source 1..23: mol_type = other RNA
gcaaagcacacggcctgcagaga

SEQ ID NO: 152 - RNA, 18 nt, synthetic construct
  source 1..18: mol_type = other RNA
ccagaggtggggactgag

SEQ ID NO: 153 - RNA, 17 nt, synthetic construct
  source 1..17: mol_type = other RNA
actcagtcatggtcatt

SEQ ID NO: 154 - RNA, 22 nt, synthetic construct
  source 1..22: mol_type = other RNA
ggtcgtatgtgtgacgccattt

SEQ ID NO: 155 - RNA, 22 nt, synthetic construct
  source 1..22: mol_type = other RNA
agggacgggacgcggtgcagtg

SEQ ID NO: 156 - RNA, 20 nt, synthetic construct
  source 1..20: mol_type = other RNA
tgcctcctccgtggcctcag

SEQ ID NO: 157 - RNA, 22 nt, synthetic construct
  source 1..22: mol_type = other RNA
tgattgtcttcccccaccctca

SEQ ID NO: 158 - RNA, 22 nt, synthetic construct
  source 1..22: mol_type = other RNA
cagggaaatgggaagaactaga

SEQ ID NO: 159 - RNA, 18 nt, synthetic construct
  source 1..18: mol_type = other RNA
gggtgagggcaggtggtt

SEQ ID NO: 160 - RNA, 20 nt, synthetic construct
  source 1..20: mol_type = other RNA
aaaggcataaaaccaagaca

SEQ ID NO: 161 - RNA, 21 nt, synthetic construct
  source 1..21: mol_type = other RNA
tcggctgtgtatctctgtgtc

SEQ ID NO: 162 - RNA, 17 nt, synthetic construct
  source 1..17: mol_type = other RNA
caggatgccagcatagt

SEQ ID NO: 163 - RNA, 17 nt, synthetic construct
  source 1..17: mol_type = other RNA
taagtgcttccatgctt

SEQ ID NO: 164 - RNA, 22 nt, synthetic construct
  source 1..22: mol_type = other RNA
tccattacactaccctgcctct

SEQ ID NO: 165 - RNA, 20 nt, synthetic construct
  source 1..20: mol_type = other RNA
tcgtttgcctttttctgctt

SEQ ID NO: 166 - RNA, 23 nt, synthetic construct
  source 1..23: mol_type = other RNA
gtgccaccttaactgcagccaat

SEQ ID NO: 167 - RNA, 21 nt, synthetic construct
  source 1..21: mol_type = other RNA
ttcgcgggcgaaggcaaagtc

SEQ ID NO: 168 - RNA, 23 nt, synthetic construct
  source 1..23: mol_type = other RNA
ggcttctttacagtgctgccttg

SEQ ID NO: 169 - RNA, 22 nt, synthetic construct
  source 1..22: mol_type = other RNA
ctcgggcggaggtggttgagtg

SEQ ID NO: 170 - RNA, 22 nt, synthetic construct
  source 1..22: mol_type = other RNA
gctgcgcttggatttcgtcccc

SEQ ID NO: 171 - RNA, 21 nt, synthetic construct
  source 1..21: mol_type = other RNA
accttgcatctgcatccccag

SEQ ID NO: 172 - RNA, 19 nt, synthetic construct
  source 1..19: mol_type = other RNA
cgctctaggcaccgcagca

SEQ ID NO: 173 - RNA, 22 nt, synthetic construct
  source 1..22: mol_type = other RNA
ggaggaaccttggagcttcggc

SEQ ID NO: 174 - RNA, 20 nt, synthetic construct
  source 1..20: mol_type = other RNA
ggggaggtgtgcagggctgg

SEQ ID NO: 175 - RNA, 22 nt, synthetic construct
  source 1..22: mol_type = other RNA
actgcattatgagcacttaaag

SEQ ID NO: 176 - RNA, 22 nt, synthetic construct
  source 1..22: mol_type = other RNA
tctcagctgctgccctctccag

SEQ ID NO: 177 - RNA, 20 nt, synthetic construct
  source 1..20: mol_type = other RNA
ccccagggcgacgcggcggg

SEQ ID NO: 178 - RNA, 22 nt, synthetic construct
  source 1..22: mol_type = other RNA
cacacactgcaattacttttgc

SEQ ID NO: 179 - RNA, 22 nt, synthetic construct
  source 1..22: mol_type = other RNA
tattgcacattactaagttgca

SEQ ID NO: 180 - RNA, 22 nt, synthetic construct
  source 1..22: mol_type = other RNA
ttctggataacatgctgaagct

SEQ ID NO: 181 - RNA, 22 nt, synthetic construct
  source 1..22: mol_type = other RNA
agtgggaggacaggaggcaggt

SEQ ID NO: 182 - RNA, 24 nt, synthetic construct
  source 1..24: mol_type = other RNA
ttgcagctgcctgggagtgacttc

SEQ ID NO: 183 - RNA, 22 nt, synthetic construct
  source 1..22: mol_type = other RNA
aattcccttgtagataacccgg

SEQ ID NO: 184 - RNA, 22 nt, synthetic construct
  source 1..22: mol_type = other RNA
ttctagatgagagatatatata

SEQ ID NO: 185 - RNA, 23 nt, synthetic construct
  source 1..23: mol_type = other RNA
aagtgcccccacagtttgagtgc

SEQ ID NO: 186 - RNA, 23 nt, synthetic construct
  source 1..23: mol_type = other RNA
tgcatcacagcctttggccctag

SEQ ID NO: 187 - RNA, 22 nt, synthetic construct
  source 1..22: mol_type = other RNA
gcctgctggggtggaacctggt

SEQ ID NO: 188 - RNA, 22 nt, synthetic construct
  source 1..22: mol_type = other RNA
cacgctcatgcacacacccaca

SEQ ID NO: 189 - RNA, 24 nt, synthetic construct
  source 1..24: mol_type = other RNA
agaggacccgtagctgctagaagg

SEQ ID NO: 190 - RNA, 20 nt, synthetic construct
  source 1..20: mol_type = other RNA
cggtggactggagtgggtgg

SEQ ID NO: 191 - RNA, 22 nt, synthetic construct
  source 1..22: mol_type = other RNA
ggggttcctggggatgggattt

SEQ ID NO: 192 - RNA, 23 nt, synthetic construct
  source 1..23: mol_type = other RNA
gaggttttctgggtttctgtttc

SEQ ID NO: 193 - RNA, 23 nt, synthetic construct
  source 1..23: mol_type = other RNA
aaagtgctgcgacatttgagcgt

SEQ ID NO: 194 - RNA, 22 nt, synthetic construct
  source 1..22: mol_type = other RNA
cgcgcggccgtgctcggagcag

SEQ ID NO: 195 - RNA, 22 nt, synthetic construct
  source 1..22: mol_type = other RNA
acggatgtttgagcatgtgcta

SEQ ID NO: 196 - RNA, 20 nt, synthetic construct
  source 1..20: mol_type = other RNA
tgttcctctgtctcccagac

SEQ ID NO: 197 - RNA, 22 nt, synthetic construct
  source 1..22: mol_type = other RNA
tgaggtagtaggttgtgtggtt

SEQ ID NO: 198 - RNA, 23 nt, synthetic construct
  source 1..23: mol_type = other RNA
ttgggggtgaggttggtgtctgg

SEQ ID NO: 199 - RNA, 21 nt, synthetic construct
  source 1..21: mol_type = other RNA
ctctgatcgccctctcagctc

SEQ ID NO: 200 - RNA, 22 nt, synthetic construct
  source 1..22: mol_type = other RNA
tacagccctgtgatctttccag

SEQ ID NO: 201 - RNA, 22 nt, synthetic construct
  source 1..22: mol_type = other RNA
gtgagccagtggaatggagagg

SEQ ID NO: 202 - RNA, 22 nt, synthetic construct
  source 1..22: mol_type = other RNA
gagaaatgctggactaatctgc

SEQ ID NO: 203 - RNA, 25 nt, synthetic construct
  source 1..25: mol_type = other RNA
cagggcagagggcacaggaatctga

SEQ ID NO: 204 - RNA, 22 nt, synthetic construct
  source 1..22: mol_type = other RNA
tgtaaacatcctcgactggaag

SEQ ID NO: 205 - RNA, 21 nt, synthetic construct
  source 1..21: mol_type = other RNA
tggcagggaggctgggagggg

SEQ ID NO: 206 - RNA, 21 nt, synthetic construct
  source 1..21: mol_type = other RNA
cccttgggtctgatggggtag

SEQ ID NO: 207 - RNA, 21 nt, synthetic construct
  source 1..21: mol_type = other RNA
cacaggcttagaaaagacagt

SEQ ID NO: 208 - RNA, 21 nt, synthetic construct
  source 1..21: mol_type = other RNA
ttctttgtttttaattcacag

SEQ ID NO: 209 - RNA, 23 nt, synthetic construct
  source 1..23: mol_type = other RNA
ttgctctgctcccccgcccccag

SEQ ID NO: 210 - RNA, 22 nt, synthetic construct
  source 1..22: mol_type = other RNA
tggtggaggaagagggcagctc

SEQ ID NO: 211 - RNA, 22 nt, synthetic construct
  source 1..22: mol_type = other RNA
actttaacatggaagtgctttc

SEQ ID NO: 212 - RNA, 23 nt, synthetic construct
  source 1..23: mol_type = other RNA
atcccttgcaggggctgttgggt

SEQ ID NO: 213 - RNA, 21 nt, synthetic construct
  source 1..21: mol_type = other RNA
cctggaaacactgaggttgtg

SEQ ID NO: 214 - RNA, 21 nt, synthetic construct
  source 1..21: mol_type = other RNA
cgccgcgcgcatcggctcagc

SEQ ID NO: 215 - RNA, 23 nt, synthetic construct
  source 1..23: mol_type = other RNA
ggcaggttctcaccctctctagg

SEQ ID NO: 216 - RNA, 22 nt, synthetic construct
  source 1..22: mol_type = other RNA
ttgaggagacatggtgggggcc

SEQ ID NO: 217 - RNA, 22 nt, synthetic construct
  source 1..22: mol_type = other RNA
catcatcgtctcaaatgagtct

SEQ ID NO: 218 - RNA, 22 nt, synthetic construct
  source 1..22: mol_type = other RNA
aaagtgcatccttttagagtgt

SEQ ID NO: 219 - RNA, 20 nt, synthetic construct
  source 1..20: mol_type = other RNA
ttgctgacctgggtggtggt

SEQ ID NO: 220 - RNA, 21 nt, synthetic construct
  source 1..21: mol_type = other RNA
tacttttctaggttgttgggg

SEQ ID NO: 221 - RNA, 22 nt, synthetic construct
  source 1..22: mol_type = other RNA
attctaatttctccacgtcttt

SEQ ID NO: 222 - RNA, 23 nt, synthetic construct
  source 1..23: mol_type = other RNA
aagtgccgccatcttttgagtgt

SEQ ID NO: 223 - RNA, 23 nt, synthetic construct
  source 1..23: mol_type = other RNA
tggctgcttcccttggtctccag

SEQ ID NO: 224 - RNA, 22 nt, synthetic construct
  source 1..22: mol_type = other RNA
tatgcattgtatttttaggtcc

SEQ ID NO: 225 - RNA, 21 nt, synthetic construct
  source 1..21: mol_type = other RNA
ggctagcaacagcgcttacct

SEQ ID NO: 226 - RNA, 21 nt, synthetic construct
  source 1..21: mol_type = other RNA
tgcctccttggtctccggcag

SEQ ID NO: 227 - RNA, 22 nt, synthetic construct
  source 1..22: mol_type = other RNA
caacctcgacgatctcctcagc

SEQ ID NO: 228 - RNA, 22 nt, synthetic construct
  source 1..22: mol_type = other RNA
cagggcaggaagaagtggacaa

SEQ ID NO: 229 - RNA, 22 nt, synthetic construct
  source 1..22: mol_type = other RNA
tggggtgcccactccgcaagtt

SEQ ID NO: 230 - RNA, 24 nt, synthetic construct
  source 1..24: mol_type = other RNA
gttccacactgacactgcagaagt

SEQ ID NO: 231 - RNA, 22 nt, synthetic construct
  source 1..22: mol_type = other RNA
aacaatatcctggtgctgagtg

SEQ ID NO: 232 - RNA, 23 nt, synthetic construct
  source 1..23: mol_type = other RNA
tgagagtggaattcacagtattt

SEQ ID NO: 233 - RNA, 22 nt, synthetic construct
  source 1..22: mol_type = other RNA
aaacattcgcggtgcacttctt

SEQ ID NO: 234 - RNA, 18 nt, synthetic construct
  source 1..18: mol_type = other RNA
tcgaggagctcacagtct

SEQ ID NO: 235 - RNA, 21 nt, synthetic construct
  source 1..21: mol_type = other RNA
gcagggacagcaaaggggtgc

SEQ ID NO: 236 - RNA, 18 nt, synthetic construct
  source 1..18: mol_type = other RNA
ctggcagggggagaggta

SEQ ID NO: 237 - RNA, 21 nt, synthetic construct
  source 1..21: mol_type = other RNA
cacggcaaaagaaacaatcca

SEQ ID NO: 238 - RNA, 23 nt, synthetic construct
  source 1..23: mol_type = other RNA
tttggcactagcacatttttgct

SEQ ID NO: 239 - RNA, 21 nt, synthetic construct
  source 1..21: mol_type = other RNA
tatggtactccttaagctaac

SEQ ID NO: 240 - RNA, 25 nt, synthetic construct
  source 1..25: mol_type = other RNA
aggcaccagccaggcattgctcagc

SEQ ID NO: 241 - RNA, 22 nt, synthetic construct
  source 1..22: mol_type = other RNA
gtgaacgggcgccatcccgagg

SEQ ID NO: 242 - RNA, 22 nt, synthetic construct
  source 1..22: mol_type = other RNA
tgtgatatcatggttcctggga

SEQ ID NO: 243 - RNA, 23 nt, synthetic construct
  source 1..23: mol_type = other RNA
aaactctacttgtccttctgagt

SEQ ID NO: 244 - RNA, 20 nt, synthetic construct
  source 1..20: mol_type = other RNA
cattacagcacagccattct

SEQ ID NO: 245 - RNA, 20 nt, synthetic construct
  source 1..20: mol_type = other RNA
tcacacctgcctcgcccccc

SEQ ID NO: 246 - RNA, 18 nt, synthetic construct
  source 1..18: mol_type = other RNA
taaaatttgcatccagga

SEQ ID NO: 247 - RNA, 22 nt, synthetic construct
  source 1..22: mol_type = other RNA
ctgcaatgtaagcacttcttac

SEQ ID NO: 248 - RNA, 22 nt, synthetic construct
  source 1..22: mol_type = other RNA
agtggggaacccttccatgagg

SEQ ID NO: 249 - RNA, 22 nt, synthetic construct
  source 1..22: mol_type = other RNA
tctcccttcctgccctggctag

SEQ ID NO: 250 - RNA, 22 nt, synthetic construct
  source 1..22: mol_type = other RNA
aacggcaatgacttttgtacca

SEQ ID NO: 251 - RNA, 21 nt, synthetic construct
  source 1..21: mol_type = other RNA
tcacctggctggcccgcccag

SEQ ID NO: 252 - RNA, 20 nt, synthetic construct
  source 1..20: mol_type = other RNA
aatgtgtagcaaaagacaga

SEQ ID NO: 253 - RNA, 17 nt, synthetic construct
  source 1..17: mol_type = other RNA
accccactcctggtacc

SEQ ID NO: 254 - RNA, 20 nt, synthetic construct
  source 1..20: mol_type = other RNA
tcttttctttgagactcact

SEQ ID NO: 255 - RNA, 19 nt, synthetic construct
  source 1..19: mol_type = other RNA
agtgtggctttcttagagc

SEQ ID NO: 256 - RNA, 22 nt, synthetic construct
  source 1..22: mol_type = other RNA
cgtgttcacagcggaccttgat

SEQ ID NO: 257 - RNA, 21 nt, synthetic construct
  source 1..21: mol_type = other RNA
tcccctccactttcctcctag

SEQ ID NO: 258 - RNA, 22 nt, synthetic construct
  source 1..22: mol_type = other RNA
cgtcccggggctgcgcgaggca

SEQ ID NO: 259 - RNA, 24 nt, synthetic construct
  source 1..24: mol_type = other RNA
aaagacataggatagagtcacctc

SEQ ID NO: 260 - RNA, 22 nt, synthetic construct
  source 1..22: mol_type = other RNA
tctgggcaacaaagtgagacct

SEQ ID NO: 261 - RNA, 23 nt, synthetic construct
  source 1..23: mol_type = other RNA
gggatggtagaccggtgacgtgc

SEQ ID NO: 262 - RNA, 23 nt, synthetic construct
  source 1..23: mol_type = other RNA
ggggaaagcgagtagggacattt

SEQ ID NO: 263 - RNA, 22 nt, synthetic construct
  source 1..22: mol_type = other RNA
ctttcagtcggatgtttgcagc

SEQ ID NO: 264 - RNA, 19 nt, synthetic construct
  source 1..19: mol_type = other RNA
ggccttgttcctgtcccca

SEQ ID NO: 265 - RNA, 21 nt, synthetic construct
  source 1..21: mol_type = other RNA
ctccagagggatgcactttct

SEQ ID NO: 266 - RNA, 21 nt, synthetic construct
  source 1..21: mol_type = other RNA
ttgccagggcaggaggtggaa

SEQ ID NO: 267 - RNA, 25 nt, synthetic construct
  source 1..25: mol_type = other RNA
agtggttcttaacagttcaacagtt

SEQ ID NO: 268 - RNA, 20 nt, synthetic construct
  source 1..20: mol_type = other RNA
tcagtgtctggatttcctag

SEQ ID NO: 269 - RNA, 18 nt, synthetic construct
  source 1..18: mol_type = other RNA
cgtgtcttctggcttgat

SEQ ID NO: 270 - RNA, 23 nt, synthetic construct
  source 1..23: mol_type = other RNA
caaagtgctcatagtgcaggtag

SEQ ID NO: 271 - RNA, 22 nt, synthetic construct
  source 1..22: mol_type = other RNA
tgccccaacaaggaaggacaag

SEQ ID NO: 272 - RNA, 18 nt, synthetic construct
  source 1..18: mol_type = other RNA
atcccacctctgccacca

SEQ ID NO: 273 - RNA, 22 nt, synthetic construct
  source 1..22: mol_type = other RNA
aataatatcacagtaggtgtac

SEQ ID NO: 274 - RNA, 23 nt, synthetic construct
  source 1..23: mol_type = other RNA
ctgataagaacagaggcccagat

SEQ ID NO: 275 - RNA, 21 nt, synthetic construct
  source 1..21: mol_type = other RNA
ctccccggcctctgcccccag

SEQ ID NO: 276 - RNA, 23 nt, synthetic construct
  source 1..23: mol_type = other RNA
aggttgggatcggttgcaatgct

SEQ ID NO: 277 - RNA, 23 nt, synthetic construct
  source 1..23: mol_type = other RNA
caaaaaccgcaattacttttgca

SEQ ID NO: 278 - RNA, 16 nt, synthetic construct
  source 1..16: mol_type = other RNA
tgccttcctgtctgtg

SEQ ID NO: 279 - RNA, 22 nt, synthetic construct
  source 1..22: mol_type = other RNA
tcacaaggtattgactggcgta

SEQ ID NO: 280 - RNA, 23 nt, synthetic construct
  source 1..23: mol_type = other RNA
ttttgcatgaccctgggagtagg

SEQ ID NO: 281 - RNA, 20 nt, synthetic construct
  source 1..20: mol_type = other RNA
taggatgggggtgagaggtg

SEQ ID NO: 282 - RNA, 25 nt, synthetic construct
  source 1..25: mol_type = other RNA
aaaaaccacaattacttttgcacca

SEQ ID NO: 283 - RNA, 20 nt, synthetic construct
  source 1..20: mol_type = other RNA
tgaggagatgctgggactga

SEQ ID NO: 284 - RNA, 22 nt, synthetic construct
  source 1..22: mol_type = other RNA
ggcgacaaaacgagaccctgtc

SEQ ID NO: 285 - RNA, 22 nt, synthetic construct
  source 1..22: mol_type = other RNA
cgcctcttcagcgctgtcttcc

SEQ ID NO: 286 - RNA, 22 nt, synthetic construct
  source 1..22: mol_type = other RNA
acgggcagggcagtgcaccctg

SEQ ID NO: 287 - RNA, 21 nt, synthetic construct
  source 1..21: mol_type = other RNA
tcagctactacctctattagg

SEQ ID NO: 288 - RNA, 22 nt, synthetic construct
  source 1..22: mol_type = other RNA
gtgcatggctgtatatataaca

SEQ ID NO: 289 - RNA, 22 nt, synthetic construct
  source 1..22: mol_type = other RNA
gcgactctgaaaactagaaggt

SEQ ID NO: 290 - RNA, 18 nt, synthetic construct
  source 1..18: mol_type = other RNA
cactgcaggactcagcag

SEQ ID NO: 291 - RNA, 22 nt, synthetic construct
  source 1..22: mol_type = other RNA
tgcaacgaacctgagccactga

SEQ ID NO: 292 - RNA, 20 nt, synthetic construct
  source 1..20: mol_type = other RNA
actggacttggagccagaag

SEQ ID NO: 293 - RNA, 22 nt, synthetic construct
  source 1..22: mol_type = other RNA
gtgaattaccgaagggccataa

SEQ ID NO: 294 - RNA, 20 nt, synthetic construct
  source 1..20: mol_type = other RNA
tggcttttaactttgatggc

SEQ ID NO: 295 - RNA, 22 nt, synthetic construct
  source 1..22: mol_type = other RNA
caccccctgtttcctggcccac

SEQ ID NO: 296 - RNA, 21 nt, synthetic construct
  source 1..21: mol_type = other RNA
aaaatttctttcactacttag

SEQ ID NO: 297 - RNA, 21 nt, synthetic construct
  source 1..21: mol_type = other RNA
taaagtgctgacagtgcagat

SEQ ID NO: 298 - RNA, 22 nt, synthetic construct
  source 1..22: mol_type = other RNA
tccagtacaggtctctcatttc

SEQ ID NO: 299 - RNA, 21 nt, synthetic construct
  source 1..21: mol_type = other RNA
tggtagactatggaacgtagg

SEQ ID NO: 300 - RNA, 22 nt, synthetic construct
  source 1..22: mol_type = other RNA
aaggtattgttcagacttatga

SEQ ID NO: 301 - RNA, 22 nt, synthetic construct
  source 1..22: mol_type = other RNA
tgagggacagatgccagaagca

SEQ ID NO: 302 - RNA, 21 nt, synthetic construct
  source 1..21: mol_type = other RNA
gggctagggcctgctgccccc

SEQ ID NO: 303 - RNA, 22 nt, synthetic construct
  source 1..22: mol_type = other RNA
cggatgagcaaagaaagtggtt

SEQ ID NO: 304 - RNA, 21 nt, synthetic construct
  source 1..21: mol_type = other RNA
ccaaaccagtcgtgcctgtgg

SEQ ID NO: 305 - RNA, 17 nt, synthetic construct
  source 1..17: mol_type = other RNA
ctcagtgactcatgtgc

SEQ ID NO: 306 - RNA, 21 nt, synthetic construct
  source 1..21: mol_type = other RNA
ccgctcttcccctgaccccag

SEQ ID NO: 307 - RNA, 21 nt, synthetic construct
  source 1..21: mol_type = other RNA
tctgaattgtaagagttgtta

SEQ ID NO: 308 - RNA, 22 nt, synthetic construct
  source 1..22: mol_type = other RNA
tgaggtagtagtttgtacagtt

SEQ ID NO: 309 - RNA, 22 nt, synthetic construct
  source 1..22: mol_type = other RNA
catgacgtcacagaggcttcgc

SEQ ID NO: 310 - RNA, 22 nt, synthetic construct
  source 1..22: mol_type = other RNA
cacacaagtggcccccaacact

SEQ ID NO: 311 - RNA, 19 nt, synthetic construct
  source 1..19: mol_type = other RNA
accaggcaagaaatattgt

SEQ ID NO: 312 - RNA, 17 nt, synthetic construct
  source 1..17: mol_type = other RNA
ccggcatgtccagggca

SEQ ID NO: 313 - RNA, 22 nt, synthetic construct
  source 1..22: mol_type = other RNA
tttaagaaaacaccatggagat

SEQ ID NO: 314 - RNA, 22 nt, synthetic construct
  source 1..22: mol_type = other RNA
gaagaactgttgcatttgccct

SEQ ID NO: 315 - RNA, 23 nt, synthetic construct
  source 1..23: mol_type = other RNA
cgggtagagagggcagtgggagg

SEQ ID NO: 316 - RNA, 22 nt, synthetic construct
  source 1..22: mol_type = other RNA
caatcactaactccactgccat

SEQ ID NO: 317 - RNA, 22 nt, synthetic construct
  source 1..22: mol_type = other RNA
tgggggctggatggggtagagt

SEQ ID NO: 318 - RNA, 22 nt, synthetic construct
  source 1..22: mol_type = other RNA
taatgattcatcagactcagat

SEQ ID NO: 319 - RNA, 22 nt, synthetic construct
  source 1..22: mol_type = other RNA
ttctccaaaagggagcactttc

SEQ ID NO: 320 - RNA, 23 nt, synthetic construct
  source 1..23: mol_type = other RNA
aaaagtgcttacagtgcaggtag

SEQ ID NO: 321 - RNA, 22 nt, synthetic construct
  source 1..22: mol_type = other RNA
ctcaaaccggctgtgcctgtgg

SEQ ID NO: 322 - RNA, 23 nt, synthetic construct
  source 1..23: mol_type = other RNA
aggttgtccgtgttgtcttctct

SEQ ID NO: 323 - RNA, 20 nt, synthetic construct
  source 1..20: mol_type = other RNA
gaggaaatgcagatgctgga

SEQ ID NO: 324 - RNA, 22 nt, synthetic construct
  source 1..22: mol_type = other RNA
aactctgaccccttaggttgat

SEQ ID NO: 325 - RNA, 20 nt, synthetic construct
  source 1..20: mol_type = other RNA
gttgtgtcagtttatcaaac

SEQ ID NO: 326 - RNA, 22 nt, synthetic construct
  source 1..22: mol_type = other RNA
tcaagtagtttcatgataaagg

SEQ ID NO: 327 - RNA, 24 nt, synthetic construct
  source 1..24: mol_type = other RNA
acacacttacccgtagagattcta

SEQ ID NO: 328 - RNA, 24 nt, synthetic construct
  source 1..24: mol_type = other RNA
cctgctggtcaggagtggatactg

SEQ ID NO: 329 - RNA, 23 nt, synthetic construct
  source 1..23: mol_type = other RNA
tctgagttcctggagcctggtct

SEQ ID NO: 330 - RNA, 18 nt, synthetic construct
  source 1..18: mol_type = other RNA
cagcagtgcgcagggctg

SEQ ID NO: 331 - RNA, 23 nt, synthetic construct
  source 1..23: mol_type = other RNA
tggtcagaggcagcaggaaatga

SEQ ID NO: 332 - RNA, 22 nt, synthetic construct
  source 1..22: mol_type = other RNA
agctacagttacttttgcacca

SEQ ID NO: 333 - RNA, 22 nt, synthetic construct
  source 1..22: mol_type = other RNA
tgacctgggactcggacagctg

SEQ ID NO: 334 - RNA, 18 nt, synthetic construct
  source 1..18: mol_type = other RNA
tggatatgatgactgaaa

SEQ ID NO: 335 - RNA, 23 nt, synthetic construct
  source 1..23: mol_type = other RNA
cctggacaccgctcagccggccg

SEQ ID NO: 336 - RNA, 22 nt, synthetic construct
  source 1..22: mol_type = other RNA
tgcctgtctacacttgctgtgc

SEQ ID NO: 337 - RNA, 22 nt, synthetic construct
  source 1..22: mol_type = other RNA
aaatgtcacctttttgagagga

SEQ ID NO: 338 - RNA, 22 nt, synthetic construct
  source 1..22: mol_type = other RNA
ttagggccctggctccatctcc

SEQ ID NO: 339 - RNA, 21 nt, synthetic construct
  source 1..21: mol_type = other RNA
acacttgttgggatgacctgc

SEQ ID NO: 340 - RNA, 23 nt, synthetic construct
  source 1..23: mol_type = other RNA
acttgggcactgaaacaatgtcc

SEQ ID NO: 341 - RNA, 21 nt, synthetic construct
  source 1..21: mol_type = other RNA
gtaagggaccggagagtagga

SEQ ID NO: 342 - RNA, 22 nt, synthetic construct
  source 1..22: mol_type = other RNA
ctggccctctctgcccttccgt

SEQ ID NO: 343 - RNA, 23 nt, synthetic construct
  source 1..23: mol_type = other RNA
cctcaaatgtggagcactattct

SEQ ID NO: 344 - RNA, 24 nt, synthetic construct
  source 1..24: mol_type = other RNA
tggccctgactgaagaccagcagt

SEQ ID NO: 345 - RNA, 21 nt, synthetic construct
  source 1..21: mol_type = other RNA
taacgcataatatggacatgt

SEQ ID NO: 346 - RNA, 22 nt, synthetic construct
  source 1..22: mol_type = other RNA
ctctagagggaagcactttctg

SEQ ID NO: 347 - RNA, 22 nt, synthetic construct
  source 1..22: mol_type = other RNA
tccaggcaggagccggactgga

SEQ ID NO: 348 - RNA, 22 nt, synthetic construct
  source 1..22: mol_type = other RNA
aggcagcggggtgtagtggata

SEQ ID NO: 349 - RNA, 21 nt, synthetic construct
  source 1..21: mol_type = other RNA
agaagaattggcctactcagg

SEQ ID NO: 350 - RNA, 21 nt, synthetic construct
  source 1..21: mol_type = other RNA
acggcccaggcggcattggtg

SEQ ID NO: 351 - RNA, 22 nt, synthetic construct
  source 1..22: mol_type = other RNA
gaagttgcccatgttattttcg

SEQ ID NO: 352 - RNA, 21 nt, synthetic construct
  source 1..21: mol_type = other RNA
taggactagatgttggaatta

SEQ ID NO: 353 - RNA, 22 nt, synthetic construct
  source 1..22: mol_type = other RNA
catcttccagtacagtgttgga

SEQ ID NO: 354 - RNA, 20 nt, synthetic construct
  source 1..20: mol_type = other RNA
aaaaggcgggagaagcccca

SEQ ID NO: 355 - RNA, 22 nt, synthetic construct
  source 1..22: mol_type = other RNA
acttgtatgctagctcaggtag

SEQ ID NO: 356 - RNA, 22 nt, synthetic construct
  source 1..22: mol_type = other RNA
cactgtttcaccactggctctt

SEQ ID NO: 357 - RNA, 22 nt, synthetic construct
  source 1..22: mol_type = other RNA
taggactgtgcttggcacatag

SEQ ID NO: 358 - RNA, 22 nt, synthetic construct
  source 1..22: mol_type = other RNA
cctaatttgaacaccttcggta

SEQ ID NO: 359 - RNA, 22 nt, synthetic construct
  source 1..22: mol_type = other RNA
ccagagatggttgccttcctat

SEQ ID NO: 360 - RNA, 21 nt, synthetic construct
  source 1..21: mol_type = other RNA
cggcggggacggcgattggtc

SEQ ID NO: 361 - RNA, 21 nt, synthetic construct
  source 1..21: mol_type = other RNA
tgacagcgccctgcctggctc

SEQ ID NO: 362 - RNA, 23 nt, synthetic construct
  source 1..23: mol_type = other RNA
ttagggagtagaagggtggggag

SEQ ID NO: 363 - RNA, 21 nt, synthetic construct
  source 1..21: mol_type = other RNA
gcgacccatacttggtttcag

SEQ ID NO: 364 - RNA, 20 nt, synthetic construct
  source 1..20: mol_type = other RNA
gcggagagagaatggggagc

SEQ ID NO: 365 - RNA, 21 nt, synthetic construct
  source 1..21: mol_type = other RNA
caggcaggtgtagggtggagc

SEQ ID NO: 366 - RNA, 21 nt, synthetic construct
  source 1..21: mol_type = other RNA
caaaaactgcaattactttca

SEQ ID NO: 367 - RNA, 21 nt, synthetic construct
  source 1..21: mol_type = other RNA
tgacctctccgctccgcacag

SEQ ID NO: 368 - RNA, 21 nt, synthetic construct
  source 1..21: mol_type = other RNA
actggactaggagtcagaagg

SEQ ID NO: 369 - RNA, 23 nt, synthetic construct
  source 1..23: mol_type = other RNA
aggttgtccgtggtgagttcgca

SEQ ID NO: 370 - RNA, 22 nt, synthetic construct
  source 1..22: mol_type = other RNA
gctgaactgggctgagctgggc

SEQ ID NO: 371 - RNA, 22 nt, synthetic construct
  source 1..22: mol_type = other RNA
tttgttcgttcggctcgcgtga

SEQ ID NO: 372 - RNA, 20 nt, synthetic construct
  source 1..20: mol_type = other RNA
ctgcaaagggaagccctttc

SEQ ID NO: 373 - RNA, 25 nt, synthetic construct
  source 1..25: mol_type = other RNA
aggggtggtgttgggacagctccgt

SEQ ID NO: 374 - RNA, 23 nt, synthetic construct
  source 1..23: mol_type = other RNA
tccagtaccacgtgtcagggcca

SEQ ID NO: 375 - RNA, 23 nt, synthetic construct
  source 1..23: mol_type = other RNA
tatggagtggactttcagctggc

SEQ ID NO: 376 - RNA, 21 nt, synthetic construct
  source 1..21: mol_type = other RNA
tctctcggctcctcgcggctc

SEQ ID NO: 377 - RNA, 20 nt, synthetic construct
  source 1..20: mol_type = other RNA
cgcgggtcggggtctgcagg

SEQ ID NO: 378 - RNA, 17 nt, synthetic construct
  source 1..17: mol_type = other RNA
gcggggctgggcgcgcg

SEQ ID NO: 379 - RNA, 22 nt, synthetic construct
  source 1..22: mol_type = other RNA
ttgggttttctcttcaatccag

SEQ ID NO: 380 - RNA, 23 nt, synthetic construct
  source 1..23: mol_type = other RNA
tcaaaatgtagaggaagacccca

SEQ ID NO: 381 - RNA, 22 nt, synthetic construct
  source 1..22: mol_type = other RNA
gctaaggaagtcctgtgctcag

SEQ ID NO: 382 - RNA, 21 nt, synthetic construct
  source 1..21: mol_type = other RNA
gtgcattgtagttgcattgca

SEQ ID NO: 383 - RNA, 22 nt, synthetic construct
  source 1..22: mol_type = other RNA
tgctggatcagtggttcgagtc

SEQ ID NO: 384 - RNA, 19 nt, synthetic construct
  source 1..19: mol_type = other RNA
tcaggcctctttctacctt

SEQ ID NO: 385 - RNA, 22 nt, synthetic construct
  source 1..22: mol_type = other RNA
taggttatccgtgttgccttcg

SEQ ID NO: 386 - RNA, 22 nt, synthetic construct
  source 1..22: mol_type = other RNA
ctcattgcatgggctgtgtata

SEQ ID NO: 387 - RNA, 22 nt, synthetic construct
  source 1..22: mol_type = other RNA
cagccacaactaccctgccact

SEQ ID NO: 388 - RNA, 21 nt, synthetic construct
  source 1..21: mol_type = other RNA
tgactgagcttctccccacag

SEQ ID NO: 389 - RNA, 23 nt, synthetic construct
  source 1..23: mol_type = other RNA
catcagcaccctatgtcctttct

SEQ ID NO: 390 - RNA, 18 nt, synthetic construct
  source 1..18: mol_type = other RNA
agggcatgtccagggggt

SEQ ID NO: 391 - RNA, 22 nt, synthetic construct
  source 1..22: mol_type = other RNA
aaatctctgcaggcaaatgtga

SEQ ID NO: 392 - RNA, 19 nt, synthetic construct
  source 1..19: mol_type = other RNA
tctctctgactccatggca

SEQ ID NO: 393 - RNA, 22 nt, synthetic construct
  source 1..22: mol_type = other RNA
tcaccagccctgtgttccctag

SEQ ID NO: 394 - RNA, 22 nt, synthetic construct
  source 1..22: mol_type = other RNA
tcggatccgtctgagcttggct

SEQ ID NO: 395 - RNA, 22 nt, synthetic construct
  source 1..22: mol_type = other RNA
gttttaccacctccaggagact

SEQ ID NO: 396 - RNA, 23 nt, synthetic construct
  source 1..23: mol_type = other RNA
atcacattgccagggattaccac

SEQ ID NO: 397 - RNA, 22 nt, synthetic construct
  source 1..22: mol_type = other RNA
cttggattttcctgggcctcag

SEQ ID NO: 398 - RNA, 22 nt, synthetic construct
  source 1..22: mol_type = other RNA
tgttgtacttttttttttgttc

SEQ ID NO: 399 - RNA, 23 nt, synthetic construct
  source 1..23: mol_type = other RNA
ccacttggatctgaaggctgccc

SEQ ID NO: 400 - RNA, 23 nt, synthetic construct
  source 1..23: mol_type = other RNA
tgggcgcgccgggactgtgagac

SEQ ID NO: 401 - RNA, 21 nt, synthetic construct
  source 1..21: mol_type = other RNA
aagccctgtctcctcccatct

SEQ ID NO: 402 - RNA, 21 nt, synthetic construct
  source 1..21: mol_type = other RNA
cttccgccccgccgggcgtcg

SEQ ID NO: 403 - RNA, 21 nt, synthetic construct
  source 1..21: mol_type = other RNA
agctgtacctgaaaccaagca

SEQ ID NO: 404 - RNA, 22 nt, synthetic construct
  source 1..22: mol_type = other RNA
ctatacaacttactactttccc

SEQ ID NO: 405 - RNA, 23 nt, synthetic construct
  source 1..23: mol_type = other RNA
cctagtaggtgtccagtaagtgt

SEQ ID NO: 406 - RNA, 21 nt, synthetic construct
  source 1..21: mol_type = other RNA
acccctcgtttcttcccccag

SEQ ID NO: 407 - RNA, 22 nt, synthetic construct
  source 1..22: mol_type = other RNA
aacccctaaggcaactggatgg

SEQ ID NO: 408 - RNA, 22 nt, synthetic construct
  source 1..22: mol_type = other RNA
agttgccagggctgcctttggt

SEQ ID NO: 409 - RNA, 20 nt, synthetic construct
  source 1..20: mol_type = other RNA
cctgcgtgttttctgtccaa

SEQ ID NO: 410 - RNA, 21 nt, synthetic construct
  source 1..21: mol_type = other RNA
attgcctaacatgtgccagaa

SEQ ID NO: 411 - RNA, 18 nt, synthetic construct
  source 1..18: mol_type = other RNA
cagccccacagcctcaga

SEQ ID NO: 412 - RNA, 22 nt, synthetic construct
  source 1..22: mol_type = other RNA
cctgacccaccccctcccgcag

SEQ ID NO: 413 - RNA, 23 nt, synthetic construct
  source 1..23: mol_type = other RNA
ctgggggacgcgtgagcgcgagc

SEQ ID NO: 414 - RNA, 23 nt, synthetic construct
  source 1..23: mol_type = other RNA
taagtgcttccatgttttggtga

SEQ ID NO: 415 - RNA, 21 nt, synthetic construct
  source 1..21: mol_type = other RNA
cgacctcggcgacccctcact

SEQ ID NO: 416 - RNA, 22 nt, synthetic construct
  source 1..22: mol_type = other RNA
aagttctgttatacactcaggc

SEQ ID NO: 417 - RNA, 22 nt, synthetic construct
  source 1..22: mol_type = other RNA
gcagtagtgtagagattggttt

SEQ ID NO: 418 - RNA, 18 nt, synthetic construct
  source 1..18: mol_type = other RNA
gctggtgacatgagaggc

SEQ ID NO: 419 - RNA, 22 nt, synthetic construct
  source 1..22: mol_type = other RNA
ctgccagccccgttccagggca

SEQ ID NO: 420 - RNA, 20 nt, synthetic construct
  source 1..20: mol_type = other RNA
tatggaggtctctgtctggc

SEQ ID NO: 421 - RNA, 23 nt, synthetic construct
  source 1..23: mol_type = other RNA
caatggcacaaactcattcttga

SEQ ID NO: 422 - RNA, 22 nt, synthetic construct
  source 1..22: mol_type = other RNA
tggggagcggcccccgggtggg

SEQ ID NO: 423 - RNA, 20 nt, synthetic construct
  source 1..20: mol_type = other RNA
ggcggcggcggaggcggggg

SEQ ID NO: 424 - RNA, 17 nt, synthetic construct
  source 1..17: mol_type = other RNA
ttctgagctgaggacag

SEQ ID NO: 425 - RNA, 24 nt, synthetic construct
  source 1..24: mol_type = other RNA
tgggtagagaaggagctcagagga

SEQ ID NO: 426 - RNA, 21 nt, synthetic construct
  source 1..21: mol_type = other RNA
aggcaagatgctggcatagct

SEQ ID NO: 427 - RNA, 21 nt, synthetic construct
  source 1..21: mol_type = other RNA
gaaagcgcttctctttagagg

SEQ ID NO: 428 - RNA, 22 nt, synthetic construct
  source 1..22: mol_type = other RNA
tggtgggcacagaatctggact

SEQ ID NO: 429 - RNA, 21 nt, synthetic construct
  source 1..21: mol_type = other RNA
cattattacttttggtacgcg

SEQ ID NO: 430 - RNA, 22 nt, synthetic construct
  source 1..22: mol_type = other RNA
gcgctgacccgccttctccgca

SEQ ID NO: 431 - RNA, 21 nt, synthetic construct
  source 1..21: mol_type = other RNA
ctggcggctgtgtcttcacag

SEQ ID NO: 432 - RNA, 22 nt, synthetic construct
  source 1..22: mol_type = other RNA
gtcactgatgtctgtagctgag

SEQ ID NO: 433 - RNA, 21 nt, synthetic construct
  source 1..21: mol_type = other RNA
cccagataatggcactctcaa

SEQ ID NO: 434 - RNA, 21 nt, synthetic construct
  source 1..21: mol_type = other RNA
agttaggattaggtcgtggaa

SEQ ID NO: 435 - RNA, 24 nt, synthetic construct
  source 1..24: mol_type = other RNA
tgtggacagtgaggtagagggagt

SEQ ID NO: 436 - RNA, 22 nt, synthetic construct
  source 1..22: mol_type = other RNA
aaagatggacaattggctaaat

SEQ ID NO: 437 - RNA, 22 nt, synthetic construct
  source 1..22: mol_type = other RNA
atcctctttcgtccttcccact

SEQ ID NO: 438 - RNA, 22 nt, synthetic construct
  source 1..22: mol_type = other RNA
aaggcctttctgaaccttcaga

SEQ ID NO: 439 - RNA, 21 nt, synthetic construct
  source 1..21: mol_type = other RNA
aggccctgtcctctgccccag

SEQ ID NO: 440 - RNA, 24 nt, synthetic construct
  source 1..24: mol_type = other RNA
ttgaagggacaagtcagatatgcc

SEQ ID NO: 441 - RNA, 23 nt, synthetic construct
  source 1..23: mol_type = other RNA
tgggcaggggcttattgtaggag

SEQ ID NO: 442 - RNA, 23 nt, synthetic construct
  source 1..23: mol_type = other RNA
cacctttgtgtccccatcctgca

SEQ ID NO: 443 - RNA, 20 nt, synthetic construct
  source 1..20: mol_type = other RNA
tgggaggaggggatcttggg

SEQ ID NO: 444 - RNA, 23 nt, synthetic construct
  source 1..23: mol_type = other RNA
tggagacgcggccctgttggagt

SEQ ID NO: 445 - RNA, 21 nt, synthetic construct
  source 1..21: mol_type = other RNA
gctagtcctgactcagccagt

SEQ ID NO: 446 - RNA, 22 nt, synthetic construct
  source 1..22: mol_type = other RNA
cttatgcaagattcccttctac

SEQ ID NO: 447 - RNA, 22 nt, synthetic construct
  source 1..22: mol_type = other RNA
ctgccatgtctaagaagaaaac

SEQ ID NO: 448 - RNA, 22 nt, synthetic construct
  source 1..22: mol_type = other RNA
tcttcttcctttgcagagttga

SEQ ID NO: 449 - RNA, 24 nt, synthetic construct
  source 1..24: mol_type = other RNA
tgctgcctctcctcttgcctgcag

SEQ ID NO: 450 - RNA, 16 nt, synthetic construct
  source 1..16: mol_type = other RNA
aggaaacagggaccca

SEQ ID NO: 451 - RNA, 22 nt, synthetic construct
  source 1..22: mol_type = other RNA
ccagggaggctggtttggagga

SEQ ID NO: 452 - RNA, 21 nt, synthetic construct
  source 1..21: mol_type = other RNA
aacatagaggaaattccacgt

SEQ ID NO: 453 - RNA, 19 nt, synthetic construct
  source 1..19: mol_type = other RNA
caggtggaggtgtgaggtc

SEQ ID NO: 454 - RNA, 22 nt, synthetic construct
  source 1..22: mol_type = other RNA
ctcccctctctttcctgttcag

SEQ ID NO: 455 - RNA, 22 nt, synthetic construct
  source 1..22: mol_type = other RNA
tgtaaacatcctacactcagct

SEQ ID NO: 456 - RNA, 21 nt, synthetic construct
  source 1..21: mol_type = other RNA
ctctccctctttacccactag

SEQ ID NO: 457 - RNA, 22 nt, synthetic construct
  source 1..22: mol_type = other RNA
ttagaacgttttagggtcaaat

SEQ ID NO: 458 - RNA, 22 nt, synthetic construct
  source 1..22: mol_type = other RNA
ataaagctagataaccgaaagt

SEQ ID NO: 459 - RNA, 22 nt, synthetic construct
  source 1..22: mol_type = other RNA
tatcatggagttggtaaagcac

SEQ ID NO: 460 - RNA, 22 nt, synthetic construct
  source 1..22: mol_type = other RNA
cagccagcccctgctcacccct

SEQ ID NO: 461 - RNA, 22 nt, synthetic construct
  source 1..22: mol_type = other RNA
agggggcgcagtcactgacgtg

SEQ ID NO: 462 - RNA, 21 nt, synthetic construct
  source 1..21: mol_type = other RNA
ttagacctagtacacgtcctt

SEQ ID NO: 463 - RNA, 22 nt, synthetic construct
  source 1..22: mol_type = other RNA
aaccagcaccccaactttggac

SEQ ID NO: 464 - RNA, 22 nt, synthetic construct
  source 1..22: mol_type = other RNA
gagcttttggcccgggttatac

SEQ ID NO: 465 - RNA, 22 nt, synthetic construct
  source 1..22: mol_type = other RNA
cttggcaccattaaaaagtaca

SEQ ID NO: 466 - RNA, 23 nt, synthetic construct
  source 1..23: mol_type = other RNA
agtatgttcttccaggacagaac

SEQ ID NO: 467 - RNA, 23 nt, synthetic construct
  source 1..23: mol_type = other RNA
tggggacgtagctggccagacag

SEQ ID NO: 468 - RNA, 21 nt, synthetic construct
  source 1..21: mol_type = other RNA
atagcagcataagcctgtctc

SEQ ID NO: 469 - RNA, 21 nt, synthetic construct
  source 1..21: mol_type = other RNA
cgggagctggggtctgcaggt

SEQ ID NO: 470 - RNA, 20 nt, synthetic construct
  source 1..20: mol_type = other RNA
tgttttgataacagtaatgt

SEQ ID NO: 471 - RNA, 22 nt, synthetic construct
  source 1..22: mol_type = other RNA
tgcatgacccttccctccccac

SEQ ID NO: 472 - RNA, 22 nt, synthetic construct
  source 1..22: mol_type = other RNA
ccctgtgcccggcccacttctg

SEQ ID NO: 473 - RNA, 22 nt, synthetic construct
  source 1..22: mol_type = other RNA
tctctgggcctgtgtcttaggc

SEQ ID NO: 474 - RNA, 23 nt, synthetic construct
  source 1..23: mol_type = other RNA
ggaggcgcaggctcggaaaggcg

SEQ ID NO: 475 - RNA, 23 nt, synthetic construct
  source 1..23: mol_type = other RNA
tctacagtgcacgtgtctccagt

SEQ ID NO: 476 - RNA, 21 nt, synthetic construct
  source 1..21: mol_type = other RNA
acctcgccgtcccgcccgccg

SEQ ID NO: 477 - RNA, 23 nt, synthetic construct
  source 1..23: mol_type = other RNA
cacccggctgtgtgcacatgtgc

SEQ ID NO: 478 - RNA, 21 nt, synthetic construct
  source 1..21: mol_type = other RNA
tctgagagagctcgatggcag

SEQ ID NO: 479 - RNA, 21 nt, synthetic construct
  source 1..21: mol_type = other RNA
agaagtggctaataatattga

SEQ ID NO: 480 - RNA, 22 nt, synthetic construct
  source 1..22: mol_type = other RNA
gctctgactttattgcactact

SEQ ID NO: 481 - RNA, 21 nt, synthetic construct
  source 1..21: mol_type = other RNA
ctcactgaacaatgaatgcaa

SEQ ID NO: 482 - RNA, 21 nt, synthetic construct
  source 1..21: mol_type = other RNA
ttgcagctgcggttgtaaggt

SEQ ID NO: 483 - RNA, 19 nt, synthetic construct
  source 1..19: mol_type = other RNA
aaaaaccacaattactttt

SEQ ID NO: 484 - RNA, 21 nt, synthetic construct
  source 1..21: mol_type = other RNA
tgagttggccatctgagtgag

SEQ ID NO: 485 - RNA, 23 nt, synthetic construct
  source 1..23: mol_type = other RNA
aggacctgcgggacaagattctt

SEQ ID NO: 486 - RNA, 22 nt, synthetic construct
  source 1..22: mol_type = other RNA
agactgaccttcaaccccacag

SEQ ID NO: 487 - RNA, 22 nt, synthetic construct
  source 1..22: mol_type = other RNA
tccgtctcagttactttatagc

SEQ ID NO: 488 - RNA, 22 nt, synthetic construct
  source 1..22: mol_type = other RNA
agagctgagactagaaagccca

SEQ ID NO: 489 - RNA, 22 nt, synthetic construct
  source 1..22: mol_type = other RNA
tcgtaccgtgagtaataatgcg

SEQ ID NO: 490 - RNA, 22 nt, synthetic construct
  source 1..22: mol_type = other RNA
atttccctgccattcccttggc

SEQ ID NO: 491 - RNA, 23 nt, synthetic construct
  source 1..23: mol_type = other RNA
tcaggcaaagggatatttacaga

SEQ ID NO: 492 - RNA, 22 nt, synthetic construct
  source 1..22: mol_type = other RNA
aaaccgttaccattactgagtt

SEQ ID NO: 493 - RNA, 21 nt, synthetic construct
  source 1..21: mol_type = other RNA
aaaggtaattgtggtttctgc

SEQ ID NO: 494 - RNA, 22 nt, synthetic construct
  source 1..22: mol_type = other RNA
agctctgctgctcactggcagt

SEQ ID NO: 495 - RNA, 24 nt, synthetic construct
  source 1..24: mol_type = other RNA
tatatggacttttctgatacaatg

SEQ ID NO: 496 - RNA, 23 nt, synthetic construct
  source 1..23: mol_type = other RNA
gatccatctctgcctgtattggc

SEQ ID NO: 497 - RNA, 22 nt, synthetic construct
  source 1..22: mol_type = other RNA
acaacagtgacttgctctccaa

SEQ ID NO: 498 - RNA, 24 nt, synthetic construct
  source 1..24: mol_type = other RNA
agcgcgggctgagcgctgccagtc

SEQ ID NO: 499 - RNA, 20 nt, synthetic construct
  source 1..20: mol_type = other RNA
gccggggctttgggtgaggg

SEQ ID NO: 500 - RNA, 20 nt, synthetic construct
  source 1..20: mol_type = other RNA
tagaggaagctgtggagaga

SEQ ID NO: 501 - RNA, 22 nt, synthetic construct
  source 1..22: mol_type = other RNA
caggaaggatttagggacaggc

SEQ ID NO: 502 - RNA, 23 nt, synthetic construct
  source 1..23: mol_type = other RNA
agcagcattgtacagggctatga

SEQ ID NO: 503 - RNA, 22 nt, synthetic construct
  source 1..22: mol_type = other RNA
tgggctggcagggcaagtgctg

SEQ ID NO: 504 - RNA, 18 nt, synthetic construct
  source 1..18: mol_type = other RNA
ggtggggggtgttgtttt

SEQ ID NO: 505 - RNA, 22 nt, synthetic construct
  source 1..22: mol_type = other RNA
ctgcgcaagctactgccttgct

SEQ ID NO: 506 - RNA, 23 nt, synthetic construct
  source 1..23: mol_type = other RNA
cccagtgtttagactatctgttc

SEQ ID NO: 507 - RNA, 19 nt, synthetic construct
  source 1..19: mol_type = other RNA
acagcactgcctggtcaga

SEQ ID NO: 508 - RNA, 22 nt, synthetic construct
  source 1..22: mol_type = other RNA
tgagtcagcaacatatcccatg

SEQ ID NO: 509 - RNA, 22 nt, synthetic construct
  source 1..22: mol_type = other RNA
tgcaagacggatactgtcatct

SEQ ID NO: 510 - RNA, 21 nt, synthetic construct
  source 1..21: mol_type = other RNA
cagtgatttgaggattattgc

SEQ ID NO: 511 - RNA, 21 nt, synthetic construct
  source 1..21: mol_type = other RNA
aaagcgcttcccttcagagtg

SEQ ID NO: 512 - RNA, 21 nt, synthetic construct
  source 1..21: mol_type = other RNA
tctgtggagtggggtgcctgt

SEQ ID NO: 513 - RNA, 23 nt, synthetic construct
  source 1..23: mol_type = other RNA
gtgcgtggtggctcgaggcgggg

SEQ ID NO: 514 - RNA, 21 nt, synthetic construct
  source 1..21: mol_type = other RNA
tgtcacccgctccttgcccag

SEQ ID NO: 515 - RNA, 22 nt, synthetic construct
  source 1..22: mol_type = other RNA
tgctggctcatttcatatgtgt

SEQ ID NO: 516 - RNA, 20 nt, synthetic construct
  source 1..20: mol_type = other RNA
cagtgatcgtctctgctggc

SEQ ID NO: 517 - RNA, 20 nt, synthetic construct
  source 1..20: mol_type = other RNA
ctgcaaagggaagccctttc

SEQ ID NO: 518 - RNA, 22 nt, synthetic construct
  source 1..22: mol_type = other RNA
attgggaacattttgcatgtat

SEQ ID NO: 519 - RNA, 17 nt, synthetic construct
  source 1..17: mol_type = other RNA
aagactgagaggaggga

SEQ ID NO: 520 - RNA, 21 nt, synthetic construct
  source 1..21: mol_type = other RNA
tagcggggattccaatattgg

SEQ ID NO: 521 - RNA, 18 nt, synthetic construct
  source 1..18: mol_type = other RNA
cagggaggtgaatgtgat

SEQ ID NO: 522 - RNA, 19 nt, synthetic construct
  source 1..19: mol_type = other RNA
tgggcgtatctgtatgcta

SEQ ID NO: 523 - RNA, 18 nt, synthetic construct
  source 1..18: mol_type = other RNA
cctagacacctccagttc

SEQ ID NO: 524 - RNA, 22 nt, synthetic construct
  source 1..22: mol_type = other RNA
gccctctgtcaccttgcagacg

SEQ ID NO: 525 - RNA, 22 nt, synthetic construct
  source 1..22: mol_type = other RNA
aacacacctggttaacctcttt

SEQ ID NO: 526 - RNA, 22 nt, synthetic construct
  source 1..22: mol_type = other RNA
accttgccttgctgcccgggcc

SEQ ID NO: 527 - RNA, 25 nt, synthetic construct
  source 1..25: mol_type = other RNA
tcaagtcactagtggttccgtttag

SEQ ID NO: 528 - RNA, 22 nt, synthetic construct
  source 1..22: mol_type = other RNA
gcccaggactttgtgcggggtg

SEQ ID NO: 529 - RNA, 22 nt, synthetic construct
  source 1..22: mol_type = other RNA
tcctcatcacactgcaccttag

SEQ ID NO: 530 - RNA, 24 nt, synthetic construct
  source 1..24: mol_type = other RNA
ttggaagcttggaccaactagctg

SEQ ID NO: 531 - RNA, 22 nt, synthetic construct
  source 1..22: mol_type = other RNA
agaagtaattgcggttttgcca

SEQ ID NO: 532 - RNA, 24 nt, synthetic construct
  source 1..24: mol_type = other RNA
ctgcaggcagaagtggggctgaca

SEQ ID NO: 533 - RNA, 20 nt, synthetic construct
  source 1..20: mol_type = other RNA
tacagtatagatgatgtact

SEQ ID NO: 534 - RNA, 22 nt, synthetic construct
  source 1..22: mol_type = other RNA
tctggggatgaggacagtgtgt

SEQ ID NO: 535 - RNA, 23 nt, synthetic construct
  source 1..23: mol_type = other RNA
agggcataggagagggttgatat

SEQ ID NO: 536 - RNA, 17 nt, synthetic construct
  source 1..17: mol_type = other RNA
gccggacaagagggagg

SEQ ID NO: 537 - RNA, 22 nt, synthetic construct
  source 1..22: mol_type = other RNA
ttctcccactaccaggctccca

SEQ ID NO: 538 - RNA, 22 nt, synthetic construct
  source 1..22: mol_type = other RNA
acaaagtgcttccctttagagt

SEQ ID NO: 539 - RNA, 21 nt, synthetic construct
  source 1..21: mol_type = other RNA
aaagtgcttcctttttgaggg

SEQ ID NO: 540 - RNA, 21 nt, synthetic construct
  source 1..21: mol_type = other RNA
ttaagacttgcagtgatgttt

SEQ ID NO: 541 - RNA, 23 nt, synthetic construct
  source 1..23: mol_type = other RNA
cgagggcatttcatgatgcaggc

SEQ ID NO: 542 - RNA, 18 nt, synthetic construct
  source 1..18: mol_type = other RNA
gaaagagagctgagtgtg

SEQ ID NO: 543 - RNA, 22 nt, synthetic construct
  source 1..22: mol_type = other RNA
cttatcagattgtattgtaatt

SEQ ID NO: 544 - RNA, 18 nt, synthetic construct
  source 1..18: mol_type = other RNA
acaggcaggattggggaa

SEQ ID NO: 545 - RNA, 22 nt, synthetic construct
  source 1..22: mol_type = other RNA
taacactgtctggtaaagatgg

SEQ ID NO: 546 - RNA, 24 nt, synthetic construct
  source 1..24: mol_type = other RNA
aagagaggagcagtggtgctgtgg

SEQ ID NO: 547 - RNA, 23 nt, synthetic construct
  source 1..23: mol_type = other RNA
tccctgtcctccaggagctcacg

SEQ ID NO: 548 - RNA, 22 nt, synthetic construct
  source 1..22: mol_type = other RNA
caaagaattctccttttgggct

SEQ ID NO: 549 - RNA, 22 nt, synthetic construct
  source 1..22: mol_type = other RNA
tcctgtactgagctgccccgag

SEQ ID NO: 550 - RNA, 21 nt, synthetic construct
  source 1..21: mol_type = other RNA
gcctatcacatatctgcctgt

SEQ ID NO: 551 - RNA, 18 nt, synthetic construct
  source 1..18: mol_type = other RNA
agaagggaagatggtgac

SEQ ID NO: 552 - RNA, 21 nt, synthetic construct
  source 1..21: mol_type = other RNA
aaaagtaattgtggtttttgc

SEQ ID NO: 553 - RNA, 22 nt, synthetic construct
  source 1..22: mol_type = other RNA
aaaagtaattgcggtctttggt

SEQ ID NO: 554 - RNA, 22 nt, synthetic construct
  source 1..22: mol_type = other RNA
taaggggtgtatggcagatgca

SEQ ID NO: 555 - RNA, 18 nt, synthetic construct
  source 1..18: mol_type = other RNA
gggattctgtagcttcct

SEQ ID NO: 556 - RNA, 21 nt, synthetic construct
  source 1..21: mol_type = other RNA
ctgggaggtcaaggctgcagt

SEQ ID NO: 557 - RNA, 22 nt, synthetic construct
  source 1..22: mol_type = other RNA
tgattgtcttcatatctagaac

SEQ ID NO: 558 - RNA, 21 nt, synthetic construct
  source 1..21: mol_type = other RNA
tgagcctctccttccctccag

SEQ ID NO: 559 - RNA, 21 nt, synthetic construct
  source 1..21: mol_type = other RNA
ttgtgcttgatctaaccatgt

SEQ ID NO: 560 - RNA, 20 nt, synthetic construct
  source 1..20: mol_type = other RNA
agacactatacgagtcatat

SEQ ID NO: 561 - RNA, 22 nt, synthetic construct
  source 1..22: mol_type = other RNA
ggtggcccggccgtgcctgagg

SEQ ID NO: 562 - RNA, 17 nt, synthetic construct
  source 1..17: mol_type = other RNA
tcatattgcttctttct

SEQ ID NO: 563 - RNA, 23 nt, synthetic construct
  source 1..23: mol_type = other RNA
tgggctgagggcaggaggcctgt

SEQ ID NO: 564 - RNA, 23 nt, synthetic construct
  source 1..23: mol_type = other RNA
tatggctttttattcctatgtga

SEQ ID NO: 565 - RNA, 22 nt, synthetic construct
  source 1..22: mol_type = other RNA
caggcgtctgtctacgtggctt

SEQ ID NO: 566 - RNA, 23 nt, synthetic construct
  source 1..23: mol_type = other RNA
tcaaggccagaggtcccacagca

SEQ ID NO: 567 - RNA, 22 nt, synthetic construct
  source 1..22: mol_type = other RNA
tgggagggcgtggatgatggtg

SEQ ID NO: 568 - RNA, 23 nt, synthetic construct
  source 1..23: mol_type = other RNA
gtgttaattaaacctctatttac

SEQ ID NO: 569 - RNA, 21 nt, synthetic construct
  source 1..21: mol_type = other RNA
ggtggatattccttctatgtt

SEQ ID NO: 570 - RNA, 23 nt, synthetic construct
  source 1..23: mol_type = other RNA
caaagtgctgttcgtgcaggtag

SEQ ID NO: 571 - RNA, 20 nt, synthetic construct
  source 1..20: mol_type = other RNA
ttgggctgggctgggttggg

SEQ ID NO: 572 - RNA, 21 nt, synthetic construct
  source 1..21: mol_type = other RNA
tggggcggggcaggtccctgc

SEQ ID NO: 573 - RNA, 23 nt, synthetic construct
  source 1..23: mol_type = other RNA
ttgaattcttggccttaagtgat

SEQ ID NO: 574 - RNA, 22 nt, synthetic construct
  source 1..22: mol_type = other RNA
aaaagtacttgcggattttgct

SEQ ID NO: 575 - RNA, 21 nt, synthetic construct
  source 1..21: mol_type = other RNA
ctgggtgagggcatctgtggt

SEQ ID NO: 576 - RNA, 22 nt, synthetic construct
  source 1..22: mol_type = other RNA
tgagtgacaggggaaatgggga

SEQ ID NO: 577 - RNA, 22 nt, synthetic construct
  source 1..22: mol_type = other RNA
gcaggtgctcacttgtcctcct

SEQ ID NO: 578 - RNA, 18 nt, synthetic construct
  source 1..18: mol_type = other RNA
gtgatggagagcaatacc

SEQ ID NO: 579 - RNA, 22 nt, synthetic construct
  source 1..22: mol_type = other RNA
aagctttttgctcgaattatgt

SEQ ID NO: 580 - RNA, 22 nt, synthetic construct
  source 1..22: mol_type = other RNA
gatccctttatctgtcctctag

SEQ ID NO: 581 - RNA, 22 nt, synthetic construct
  source 1..22: mol_type = other RNA
ctctagagggaagcactttctc

SEQ ID NO: 582 - RNA, 19 nt, synthetic construct
  source 1..19: mol_type = other RNA
cctcagatcagagccttgc

SEQ ID NO: 583 - RNA, 23 nt, synthetic construct
  source 1..23: mol_type = other RNA
cctcaccaccccttctgcctgca

SEQ ID NO: 584 - RNA, 24 nt, synthetic construct
  source 1..24: mol_type = other RNA
cagggaacagctgggtgagctgct

SEQ ID NO: 585 - RNA, 21 nt, synthetic construct
  source 1..21: mol_type = other RNA
tatgtgacctcggatgaatca

SEQ ID NO: 586 - RNA, 22 nt, synthetic construct
  source 1..22: mol_type = other RNA
cctagaaactgtaaacttagtc

SEQ ID NO: 587 - RNA, 21 nt, synthetic construct
  source 1..21: mol_type = other RNA
caacaacattaaaccacccga

SEQ ID NO: 588 - RNA, 21 nt, synthetic construct
  source 1..21: mol_type = other RNA
taacataatagtgtggattga

SEQ ID NO: 589 - RNA, 21 nt, synthetic construct
  source 1..21: mol_type = other RNA
cttgggagccctgttagactc

SEQ ID NO: 590 - RNA, 22 nt, synthetic construct
  source 1..22: mol_type = other RNA
ttccactgccactacctaattt

SEQ ID NO: 591 - RNA, 22 nt, synthetic construct
  source 1..22: mol_type = other RNA
tcggcctggggaggaggaaggg

SEQ ID NO: 592 - RNA, 22 nt, synthetic construct
  source 1..22: mol_type = other RNA
cctgcaactttgcctgatcaga

SEQ ID NO: 593 - RNA, 23 nt, synthetic construct
  source 1..23: mol_type = other RNA
gaacgcctgttcttgccaggtgg

SEQ ID NO: 594 - RNA, 22 nt, synthetic construct
  source 1..22: mol_type = other RNA
tcctgcgtaggatctgaggagt

SEQ ID NO: 595 - RNA, 19 nt, synthetic construct
  source 1..19: mol_type = other RNA
acattttccagcccattca

SEQ ID NO: 596 - RNA, 23 nt, synthetic construct
  source 1..23: mol_type = other RNA
ccccggtgttggggcgcgtctgc

SEQ ID NO: 597 - RNA, 19 nt, synthetic construct
  source 1..19: mol_type = other RNA
ggcggggctcggagccggg

SEQ ID NO: 598 - RNA, 22 nt, synthetic construct
  source 1..22: mol_type = other RNA
tcctacgctgctctctcactcc

SEQ ID NO: 599 - RNA, 22 nt, synthetic construct
  source 1..22: mol_type = other RNA
tatgtaacatggtccactaact

SEQ ID NO: 600 - RNA, 23 nt, synthetic construct
  source 1..23: mol_type = other RNA
cccttccctcactcttctctcag

SEQ ID NO: 601 - RNA, 21 nt, synthetic construct
  source 1..21: mol_type = other RNA
cactgtgtcctttctgcgtag

SEQ ID NO: 602 - RNA, 22 nt, synthetic construct
  source 1..22: mol_type = other RNA
tctcactgtagcctcgaacccc

SEQ ID NO: 603 - RNA, 18 nt, synthetic construct
  source 1..18: mol_type = other RNA
cccagcaggacgggagcg

SEQ ID NO: 604 - RNA, 23 nt, synthetic construct
  source 1..23: mol_type = other RNA
gccccggcgcgggcgggttctgg

SEQ ID NO: 605 - RNA, 21 nt, synthetic construct
  source 1..21: mol_type = other RNA
cctgcgagtctccggcggtgg

SEQ ID NO: 606 - RNA, 22 nt, synthetic construct
  source 1..22: mol_type = other RNA
tgcctactgagctgatatcagt

SEQ ID NO: 607 - RNA, 22 nt, synthetic construct
  source 1..22: mol_type = other RNA
tgtgatatcatggttcctggga

SEQ ID NO: 608 - RNA, 22 nt, synthetic construct
  source 1..22: mol_type = other RNA
tagttcttccctttgcccaatt

SEQ ID NO: 609 - RNA, 22 nt, synthetic construct
  source 1..22: mol_type = other RNA
agggggatggcagagcaaaatt

SEQ ID NO: 610 - RNA, 20 nt, synthetic construct
  source 1..20: mol_type = other RNA
gcggaaggcggagcggcgga

SEQ ID NO: 611 - RNA, 22 nt, synthetic construct
  source 1..22: mol_type = other RNA
agagttaactcaaaatggacta

SEQ ID NO: 612 - RNA, 23 nt, synthetic construct
  source 1..23: mol_type = other RNA
aaaagcacttttctgtctcccag

SEQ ID NO: 613 - RNA, 23 nt, synthetic construct
  source 1..23: mol_type = other RNA
ttgcactctggccttctcccagg

SEQ ID NO: 614 - RNA, 25 nt, synthetic construct
  source 1..25: mol_type = other RNA
caaccctaggagagggtgccattca

SEQ ID NO: 615 - RNA, 22 nt, synthetic construct
  source 1..22: mol_type = other RNA
accaagtctgcgtcatcctctc

SEQ ID NO: 616 - RNA, 18 nt, synthetic construct
  source 1..18: mol_type = other RNA
cattcaactagtgattgt

SEQ ID NO: 617 - RNA, 22 nt, synthetic construct
  source 1..22: mol_type = other RNA
gcctctctcggagtcgctcgga

SEQ ID NO: 618 - RNA, 23 nt, synthetic construct
  source 1..23: mol_type = other RNA
tagacgtggtgaaggattgagtg

SEQ ID NO: 619 - RNA, 21 nt, synthetic construct
  source 1..21: mol_type = other RNA
tttcagataacagtattacat

SEQ ID NO: 620 - RNA, 26 nt, synthetic construct
  source 1..26: mol_type = other RNA
aagtagttggtttgtatgagatggtt

SEQ ID NO: 621 - RNA, 25 nt, synthetic construct
  source 1..25: mol_type = other RNA
atggggtgagatggggaggagcagc

SEQ ID NO: 622 - RNA, 22 nt, synthetic construct
  source 1..22: mol_type = other RNA
actcaaaatgggggcgctttcc

SEQ ID NO: 623 - RNA, 22 nt, synthetic construct
  source 1..22: mol_type = other RNA
atattaccattagctcatcttt

SEQ ID NO: 624 - RNA, 19 nt, synthetic construct
  source 1..19: mol_type = other RNA
aggcacggtgtcagcaggc

SEQ ID NO: 625 - RNA, 22 nt, synthetic construct
  source 1..22: mol_type = other RNA
aaaagtaattgcggtttttgcc

SEQ ID NO: 626 - RNA, 22 nt, synthetic construct
  source 1..22: mol_type = other RNA
aattgcactttagcaatggtga

SEQ ID NO: 627 - RNA, 22 nt, synthetic construct
  source 1..22: mol_type = other RNA
tggtctaggattgttggaggag

SEQ ID NO: 628 - RNA, 19 nt, synthetic construct
  source 1..19: mol_type = other RNA
ggcttgcatgggggactgg

SEQ ID NO: 629 - RNA, 26 nt, synthetic construct
  source 1..26: mol_type = other RNA
ctcggccgcggcgcgtagcccccgcc

SEQ ID NO: 630 - RNA, 21 nt, synthetic construct
  source 1..21: mol_type = other RNA
tgggctcagggtacaaaggtt

SEQ ID NO: 631 - RNA, 22 nt, synthetic construct
  source 1..22: mol_type = other RNA
caaaaactgcaattacttttgc

SEQ ID NO: 632 - RNA, 22 nt, synthetic construct
  source 1..22: mol_type = other RNA
aggataggaagaatgaagtgct

SEQ ID NO: 633 - RNA, 22 nt, synthetic construct
  source 1..22: mol_type = other RNA
tgaaactggagcgcctggagga

SEQ ID NO: 634 - RNA, 22 nt, synthetic construct
  source 1..22: mol_type = other RNA
tggtggtttacaaagtaattca

SEQ ID NO: 635 - RNA, 22 nt, synthetic construct
  source 1..22: mol_type = other RNA
tctggccttgacttgactcttt

SEQ ID NO: 636 - RNA, 23 nt, synthetic construct
  source 1..23: mol_type = other RNA
tgaggggcagagagcgagacttt

SEQ ID NO: 637 - RNA, 22 nt, synthetic construct
  source 1..22: mol_type = other RNA
ctcctccacagcccctgctcat

SEQ ID NO: 638 - RNA, 21 nt, synthetic construct
  source 1..21: mol_type = other RNA
cggtcgccgcggttcgccgcc

SEQ ID NO: 639 - RNA, 26 nt, synthetic construct
  source 1..26: mol_type = other RNA
gatgatgatggcagcaaattctgaaa

SEQ ID NO: 640 - RNA, 22 nt, synthetic construct
  source 1..22: mol_type = other RNA
taacactgtctggtaacgatgt

SEQ ID NO: 641 - RNA, 18 nt, synthetic construct
  source 1..18: mol_type = other RNA
aggagaagtaaagtagaa

SEQ ID NO: 642 - RNA, 19 nt, synthetic construct
  source 1..19: mol_type = other RNA
tgggggagatgggggttga

SEQ ID NO: 643 - RNA, 21 nt, synthetic construct
  source 1..21: mol_type = other RNA
tactgcagacagtggcaatca

SEQ ID NO: 644 - RNA, 20 nt, synthetic construct
  source 1..20: mol_type = other RNA
agccccctggccccaaaccc

SEQ ID NO: 645 - RNA, 22 nt, synthetic construct
  source 1..22: mol_type = other RNA
aaattattgtacatcggatgag

SEQ ID NO: 646 - RNA, 23 nt, synthetic construct
  source 1..23: mol_type = other RNA
aaagtctcgctctctgcccctca

SEQ ID NO: 647 - RNA, 22 nt, synthetic construct
  source 1..22: mol_type = other RNA
aaaaactgagactacttttgca

SEQ ID NO: 648 - RNA, 24 nt, synthetic construct
  source 1..24: mol_type = other RNA
gctggtttcatatggtggtttaga

SEQ ID NO: 649 - RNA, 22 nt, synthetic construct
  source 1..22: mol_type = other RNA
caaaaaccggcaattacttttg

SEQ ID NO: 650 - RNA, 22 nt, synthetic construct
  source 1..22: mol_type = other RNA
caggatgtggtcaagtgttgtt

SEQ ID NO: 651 - RNA, 22 nt, synthetic construct
  source 1..22: mol_type = other RNA
ctcctggggcccgcactctcgc

SEQ ID NO: 652 - RNA, 22 nt, synthetic construct
  source 1..22: mol_type = other RNA
gagtgccttcttttggagcgtt

SEQ ID NO: 653 - RNA, 21 nt, synthetic construct
  source 1..21: mol_type = other RNA
cagatcatgggactgtctcag

SEQ ID NO: 654 - RNA, 23 nt, synthetic construct
  source 1..23: mol_type = other RNA
cgcagacaatgcctactggccta

SEQ ID NO: 655 - RNA, 23 nt, synthetic construct
  source 1..23: mol_type = other RNA
acgggtattcttgggtggataat

SEQ ID NO: 656 - RNA, 21 nt, synthetic construct
  source 1..21: mol_type = other RNA
atgtattcgtactgtctgatg

SEQ ID NO: 657 - RNA, 22 nt, synthetic construct
  source 1..22: mol_type = other RNA
tagtggtcctaaacatttcaca

SEQ ID NO: 658 - RNA, 21 nt, synthetic construct
  source 1..21: mol_type = other RNA
aatataacacagatggcctgt

SEQ ID NO: 659 - RNA, 17 nt, synthetic construct
  source 1..17: mol_type = other RNA
acattgccagggagttt

SEQ ID NO: 660 - RNA, 22 nt, synthetic construct
  source 1..22: mol_type = other RNA
taatgcccctaaaaatccttat

SEQ ID NO: 661 - RNA, 22 nt, synthetic construct
  source 1..22: mol_type = other RNA
tgtgactttaagggaaatggcg

SEQ ID NO: 662 - RNA, 22 nt, synthetic construct
  source 1..22: mol_type = other RNA
taatctcagctggcaactgtga

SEQ ID NO: 663 - RNA, 23 nt, synthetic construct
  source 1..23: mol_type = other RNA
tactctggagagtgacaatcatg

SEQ ID NO: 664 - RNA, 20 nt, synthetic construct
  source 1..20: mol_type = other RNA
tctggccagctacgtcccca

SEQ ID NO: 665 - RNA, 24 nt, synthetic construct
  source 1..24: mol_type = other RNA
tggggggacaggatgagaggctgt

SEQ ID NO: 666 - RNA, 24 nt, synthetic construct
  source 1..24: mol_type = other RNA
gacttggggaccagaccttttctt

SEQ ID NO: 667 - RNA, 22 nt, synthetic construct
  source 1..22: mol_type = other RNA
tggcggcggtagttatgggctt

SEQ ID NO: 668 - RNA, 24 nt, synthetic construct
  source 1..24: mol_type = other RNA
ttaatgctaatcgtgataggggtt

SEQ ID NO: 669 - RNA, 23 nt, synthetic construct
  source 1..23: mol_type = other RNA
ttgaggggagaatgaggtggaga

SEQ ID NO: 670 - RNA, 27 nt, synthetic construct
  source 1..27: mol_type = other RNA
cactgtaggtgatggtgagagtgggca

SEQ ID NO: 671 - RNA, 20 nt, synthetic construct
  source 1..20: mol_type = other RNA
taaaaactgcaattactttc

SEQ ID NO: 672 - RNA, 22 nt, synthetic construct
  source 1..22: mol_type = other RNA
aggggaccaaagagatatatag

SEQ ID NO: 673 - RNA, 21 nt, synthetic construct
  source 1..21: mol_type = other RNA
caaatggacaggataacacct

SEQ ID NO: 674 - RNA, 22 nt, synthetic construct
  source 1..22: mol_type = other RNA
ctatacgacctgctgcctttct

SEQ ID NO: 675 - RNA, 22 nt, synthetic construct
  source 1..22: mol_type = other RNA
ttcaggtctggggctgaaacct

SEQ ID NO: 676 - RNA, 23 nt, synthetic construct
  source 1..23: mol_type = other RNA
tctagaggaagcactttctgttt

SEQ ID NO: 677 - RNA, 21 nt, synthetic construct
  source 1..21: mol_type = other RNA
tgaggtgaccgcagatgggaa

SEQ ID NO: 678 - RNA, 18 nt, synthetic construct
  source 1..18: mol_type = other RNA
cggctggaggtgtgagga

SEQ ID NO: 679 - RNA, 17 nt, synthetic construct
  source 1..17: mol_type = other RNA
gtgggggagaggctgtc

SEQ ID NO: 680 - RNA, 22 nt, synthetic construct
  source 1..22: mol_type = other RNA
atgcacctgggcaaggattctg

SEQ ID NO: 681 - RNA, 23 nt, synthetic construct
  source 1..23: mol_type = other RNA
tttcaagccagggggcgtttttc

SEQ ID NO: 682 - RNA, 21 nt, synthetic construct
  source 1..21: mol_type = other RNA
aacaggtgactggttagacaa

SEQ ID NO: 683 - RNA, 22 nt, synthetic construct
  source 1..22: mol_type = other RNA
aagctgccagttgaagaactgt

SEQ ID NO: 684 - RNA, 22 nt, synthetic construct
  source 1..22: mol_type = other RNA
agaattgtggctggacatctgt

SEQ ID NO: 685 - RNA, 21 nt, synthetic construct
  source 1..21: mol_type = other RNA
tagtagaccgtatagcgtacg

SEQ ID NO: 686 - RNA, 22 nt, synthetic construct
  source 1..22: mol_type = other RNA
aaaggtaattgcagtttttccc

SEQ ID NO: 687 - RNA, 23 nt, synthetic construct
  source 1..23: mol_type = other RNA
gcagatcaggactgtaactcacc

SEQ ID NO: 688 - RNA, 23 nt, synthetic construct
  source 1..23: mol_type = other RNA
cccatcacctttccgtctcccct

SEQ ID NO: 689 - RNA, 22 nt, synthetic construct
  source 1..22: mol_type = other RNA
tgcaacttacctgagtcattga

SEQ ID NO: 690 - RNA, 21 nt, synthetic construct
  source 1..21: mol_type = other RNA
ttagtgaaggctattttaatt

SEQ ID NO: 691 - RNA, 24 nt, synthetic construct
  source 1..24: mol_type = other RNA
ccccgggaacgtcgagactggagc

SEQ ID NO: 692 - RNA, 24 nt, synthetic construct
  source 1..24: mol_type = other RNA
ggttgggcagtgaggagggtgtga

SEQ ID NO: 693 - RNA, 22 nt, synthetic construct
  source 1..22: mol_type = other RNA
taatgcattaaattattgaagg

SEQ ID NO: 694 - RNA, 22 nt, synthetic construct
  source 1..22: mol_type = other RNA
caaatgagcttaatttcctttt

SEQ ID NO: 695 - RNA, 23 nt, synthetic construct
  source 1..23: mol_type = other RNA
tggagttaagggttgcttggaga

SEQ ID NO: 696 - RNA, 23 nt, synthetic construct
  source 1..23: mol_type = other RNA
ccggggcagattggtgtagggtg

SEQ ID NO: 697 - RNA, 22 nt, synthetic construct
  source 1..22: mol_type = other RNA
taatgcccctaaaaatccttat

SEQ ID NO: 698 - RNA, 20 nt, synthetic construct
  source 1..20: mol_type = other RNA
aggaggacaagttgtgggat

SEQ ID NO: 699 - RNA, 22 nt, synthetic construct
  source 1..22: mol_type = other RNA
agaaggggtgaaatttaaacgt

SEQ ID NO: 700 - RNA, 21 nt, synthetic construct
  source 1..21: mol_type = other RNA
gtaagcaggggctctgggtga

SEQ ID NO: 701 - RNA, 22 nt, synthetic construct
  source 1..22: mol_type = other RNA
attgcctctgttctaacacaag

SEQ ID NO: 702 - RNA, 21 nt, synthetic construct
  source 1..21: mol_type = other RNA
ctgttgccactaacctcaacc

SEQ ID NO: 703 - RNA, 22 nt, synthetic construct
  source 1..22: mol_type = other RNA
gctatttcacgacaccagggtt

SEQ ID NO: 704 - RNA, 23 nt, synthetic construct
  source 1..23: mol_type = other RNA
gaatactaagtaaaaaatcagta

SEQ ID NO: 705 - RNA, 22 nt, synthetic construct
  source 1..22: mol_type = other RNA
acgtttgaatgctgtacaaggc

SEQ ID NO: 706 - RNA, 23 nt, synthetic construct
  source 1..23: mol_type = other RNA
cttgagtcgtgcctttctgaatg

SEQ ID NO: 707 - RNA, 22 nt, synthetic construct
  source 1..22: mol_type = other RNA
aatgcacctgggcaaggattca

SEQ ID NO: 708 - RNA, 23 nt, synthetic construct
  source 1..23: mol_type = other RNA
acaggcggctgtagcaatggggg

SEQ ID NO: 709 - RNA, 20 nt, synthetic construct
  source 1..20: mol_type = other RNA
tctggctgttgtggtgtgca

SEQ ID NO: 710 - RNA, 22 nt, synthetic construct
  source 1..22: mol_type = other RNA
tactgcagacgtggcaatcatg

SEQ ID NO: 711 - RNA, 22 nt, synthetic construct
  source 1..22: mol_type = other RNA
aatggctgtccgtagtatggtc

SEQ ID NO: 712 - RNA, 21 nt, synthetic construct
  source 1..21: mol_type = other RNA
tgggtggaagaaggtctggtt

SEQ ID NO: 713 - RNA, 21 nt, synthetic construct
  source 1..21: mol_type = other RNA
acagggccgcagatggagact

SEQ ID NO: 714 - RNA, 22 nt, synthetic construct
  source 1..22: mol_type = other RNA
tttcccttcagagcctggcttt

SEQ ID NO: 715 - RNA, 22 nt, synthetic construct
  source 1..22: mol_type = other RNA
gggaccatcctgcctgctgtgg

SEQ ID NO: 716 - RNA, 18 nt, synthetic construct
  source 1..18: mol_type = other RNA
aatccttgctacctgggt

SEQ ID NO: 717 - RNA, 22 nt, synthetic construct
  source 1..22: mol_type = other RNA
ctgccaattccataggtcacag

SEQ ID NO: 718 - RNA, 17 nt, synthetic construct
  source 1..17: mol_type = other RNA
atgtgggctcaggctca

SEQ ID NO: 719 - RNA, 21 nt, synthetic construct
  source 1..21: mol_type = other RNA
gcaggaacttgtgagtctcct

SEQ ID NO: 720 - RNA, 22 nt, synthetic construct
  source 1..22: mol_type = other RNA
atcgtgcatccctttagagtgt

SEQ ID NO: 721 - RNA, 22 nt, synthetic construct
  source 1..22: mol_type = other RNA
ccctgttctatgccctgaggga

SEQ ID NO: 722 - RNA, 22 nt, synthetic construct
  source 1..22: mol_type = other RNA
agtgggaggccagggcacggca

SEQ ID NO: 723 - RNA, 22 nt, synthetic construct
  source 1..22: mol_type = other RNA
tagtcccttccttgaagcggtc

SEQ ID NO: 724 - RNA, 22 nt, synthetic construct
  source 1..22: mol_type = other RNA
ctcagtagccagtgtagatcct

SEQ ID NO: 725 - RNA, 22 nt, synthetic construct
  source 1..22: mol_type = other RNA
tgtgacagattgataactgaaa

SEQ ID NO: 726 - RNA, 22 nt, synthetic construct
  source 1..22: mol_type = other RNA
attctctctggatcccatggat

SEQ ID NO: 727 - RNA, 22 nt, synthetic construct
  source 1..22: mol_type = other RNA
tgagaaccacgtctgctctgag

SEQ ID NO: 728 - RNA, 22 nt, synthetic construct
  source 1..22: mol_type = other RNA
ttaggcttccccctcctcctgc

SEQ ID NO: 729 - RNA, 22 nt, synthetic construct
  source 1..22: mol_type = other RNA
ccagtattaactgtgctgctga

SEQ ID NO: 730 - RNA, 22 nt, synthetic construct
  source 1..22: mol_type = other RNA
atcgtgcatccctttagagtgt

SEQ ID NO: 731 - RNA, 22 nt, synthetic construct
  source 1..22: mol_type = other RNA
aaccatcgaccgttgagtggac

SEQ ID NO: 732 - RNA, 21 nt, synthetic construct
  source 1..21: mol_type = other RNA
cacaaggtattggtattacct

SEQ ID NO: 733 - RNA, 22 nt, synthetic construct
  source 1..22: mol_type = other RNA
ccaaaactgcagttacttttgc

SEQ ID NO: 734 - RNA, 22 nt, synthetic construct
  source 1..22: mol_type = other RNA
atacctcatctagaatgctgta

SEQ ID NO: 735 - RNA, 24 nt, synthetic construct
  source 1..24: mol_type = other RNA
cgggtgggagcagatcttattgag

SEQ ID NO: 736 - RNA, 22 nt, synthetic construct
  source 1..22: mol_type = other RNA
accactgaccgttgactgtacc

SEQ ID NO: 737 - RNA, 22 nt, synthetic construct
  source 1..22: mol_type = other RNA
gagagatcagaggcgcagagtg

SEQ ID NO: 738 - RNA, 22 nt, synthetic construct
  source 1..22: mol_type = other RNA
tcccaagggtgagatgctgcca

SEQ ID NO: 739 - RNA, 21 nt, synthetic construct
  source 1..21: mol_type = other RNA
gccctgacctgtcctgttctg

SEQ ID NO: 740 - RNA, 22 nt, synthetic construct
  source 1..22: mol_type = other RNA
tttttcattattgctcctgacc

SEQ ID NO: 741 - RNA, 22 nt, synthetic construct
  source 1..22: mol_type = other RNA
agccttccaggagaaatggaga

SEQ ID NO: 742 - RNA, 22 nt, synthetic construct
  source 1..22: mol_type = other RNA
tatacctcagttttatcaggtg

SEQ ID NO: 743 - RNA, 22 nt, synthetic construct
  source 1..22: mol_type = other RNA
agggcttagctgcttgtgagca

SEQ ID NO: 744 - RNA, 22 nt, synthetic construct
  source 1..22: mol_type = other RNA
cacatggccgaaacagagaagt

SEQ ID NO: 745 - RNA, 21 nt, synthetic construct
  source 1..21: mol_type = other RNA
gcaggcacagacagccctggc

SEQ ID NO: 746 - RNA, 21 nt, synthetic construct
  source 1..21: mol_type = other RNA
ggtagattttccttctatggt

SEQ ID NO: 747 - RNA, 21 nt, synthetic construct
  source 1..21: mol_type = other RNA
aagtgatctaaaggcctacat

SEQ ID NO: 748 - RNA, 21 nt, synthetic construct
  source 1..21: mol_type = other RNA
aggaggcagcgctctcaggac

SEQ ID NO: 749 - RNA, 22 nt, synthetic construct
  source 1..22: mol_type = other RNA
agaggctgagaaggtgatgttg

SEQ ID NO: 750 - RNA, 23 nt, synthetic construct
  source 1..23: mol_type = other RNA
cctgcagcgacttgatggcttcc

SEQ ID NO: 751 - RNA, 18 nt, synthetic construct
  source 1..18: mol_type = other RNA
atctgacctgatgaaggt

SEQ ID NO: 752 - RNA, 22 nt, synthetic construct
  source 1..22: mol_type = other RNA
cctctagatggaagcactgtct

SEQ ID NO: 753 - RNA, 21 nt, synthetic construct
  source 1..21: mol_type = other RNA
agccaagtggaagttacttta

SEQ ID NO: 754 - RNA, 21 nt, synthetic construct
  source 1..21: mol_type = other RNA
tcttgaagtcagaacccgcaa

SEQ ID NO: 755 - RNA, 17 nt, synthetic construct
  source 1..17: mol_type = other RNA
atggagaaggcttctga

SEQ ID NO: 756 - RNA, 21 nt, synthetic construct
  source 1..21: mol_type = other RNA
tccctctcccaccccttgcag

SEQ ID NO: 757 - RNA, 21 nt, synthetic construct
  source 1..21: mol_type = other RNA
gacagagtgccacttactgaa

SEQ ID NO: 758 - RNA, 23 nt, synthetic construct
  source 1..23: mol_type = other RNA
taaggtgcatctagtgcagttag

SEQ ID NO: 759 - RNA, 23 nt, synthetic construct
  source 1..23: mol_type = other RNA
taaggtgcatctagtgcagatag

SEQ ID NO: 760 - RNA, 22 nt, synthetic construct
  source 1..22: mol_type = other RNA
aattctgtaaaggaagaagagg

SEQ ID NO: 761 - RNA, 23 nt, synthetic construct
  source 1..23: mol_type = other RNA
tagcccccaggcttcacttggcg

SEQ ID NO: 762 - RNA, 22 nt, synthetic construct
  source 1..22: mol_type = other RNA
actgtcacttctctgcccatag

SEQ ID NO: 763 - RNA, 22 nt, synthetic construct
  source 1..22: mol_type = other RNA
caaagtccttcctatttttccc

SEQ ID NO: 764 - RNA, 22 nt, synthetic construct
  source 1..22: mol_type = other RNA
caacaaatcacagtctgccata

SEQ ID NO: 765 - RNA, 19 nt, synthetic construct
  source 1..19: mol_type = other RNA
actggatttggagccagaa

SEQ ID NO: 766 - RNA, 22 nt, synthetic construct
  source 1..22: mol_type = other RNA
tctggattgaagagacgaccca

SEQ ID NO: 767 - RNA, 22 nt, synthetic construct
  source 1..22: mol_type = other RNA
ttcgccacttccctccctgcag

SEQ ID NO: 768 - RNA, 21 nt, synthetic construct
  source 1..21: mol_type = other RNA
gaacggcttcatacaggagtt

SEQ ID NO: 769 - RNA, 19 nt, synthetic construct
  source 1..19: mol_type = other RNA
catccgtccgtctgtccac

SEQ ID NO: 770 - RNA, 22 nt, synthetic construct
  source 1..22: mol_type = other RNA
ttataatacaacctgataagtg

SEQ ID NO: 771 - RNA, 21 nt, synthetic construct
  source 1..21: mol_type = other RNA
tcaagtgtcatctgtccctag

SEQ ID NO: 772 - RNA, 22 nt, synthetic construct
  source 1..22: mol_type = other RNA
atagcagcatgaacctgtctca

SEQ ID NO: 773 - RNA, 22 nt, synthetic construct
  source 1..22: mol_type = other RNA
cactagattgtgagctcctgga

SEQ ID NO: 774 - RNA, 23 nt, synthetic construct
  source 1..23: mol_type = other RNA
tgggccagggagcagctggtggg

SEQ ID NO: 775 - RNA, 21 nt, synthetic construct
  source 1..21: mol_type = other RNA
ttgtgaagaaagaaattctta

SEQ ID NO: 776 - RNA, 22 nt, synthetic construct
  source 1..22: mol_type = other RNA
atgtgattgacggctgactcca

SEQ ID NO: 777 - RNA, 23 nt, synthetic construct
  source 1..23: mol_type = other RNA
taccctgtagatccgaatttgtg

SEQ ID NO: 778 - RNA, 22 nt, synthetic construct
  source 1..22: mol_type = other RNA
ctggtttcacatggtggcttag

SEQ ID NO: 779 - RNA, 22 nt, synthetic construct
  source 1..22: mol_type = other RNA
atagtgggaagctggcagattc

SEQ ID NO: 780 - RNA, 22 nt, synthetic construct
  source 1..22: mol_type = other RNA
caaagtttaagatccttgaagt

SEQ ID NO: 781 - RNA, 22 nt, synthetic construct
  source 1..22: mol_type = other RNA
ttctcaagagggaggcaatcat

SEQ ID NO: 782 - RNA, 25 nt, synthetic construct
  source 1..25: mol_type = other RNA
agggatcgcgggcgggtggcggcct

SEQ ID NO: 783 - RNA, 22 nt, synthetic construct
  source 1..22: mol_type = other RNA
tttgcagtaacaggtgtgagca

SEQ ID NO: 784 - RNA, 22 nt, synthetic construct
  source 1..22: mol_type = other RNA
catgctaggatagaaagaatgg

SEQ ID NO: 785 - RNA, 22 nt, synthetic construct
  source 1..22: mol_type = other RNA
agcccgccccagccgaggttct

SEQ ID NO: 786 - RNA, 22 nt, synthetic construct
  source 1..22: mol_type = other RNA
actgggcagggctgtggtgagt

SEQ ID NO: 787 - RNA, 22 nt, synthetic construct
  source 1..22: mol_type = other RNA
ggccccgggccctcgaccggac

SEQ ID NO: 788 - RNA, 16 nt, synthetic construct
  source 1..16: mol_type = other RNA
tccagctcggtggcac

SEQ ID NO: 789 - RNA, 18 nt, synthetic construct
  source 1..18: mol_type = other RNA
ttgcacttgtctcagtga

SEQ ID NO: 790 - RNA, 22 nt, synthetic construct
  source 1..22: mol_type = other RNA
tactcaggagagtggcaatcac

SEQ ID NO: 791 - RNA, 21 nt, synthetic construct
  source 1..21: mol_type = other RNA
gccccgggcagtgtgatcatc

SEQ ID NO: 792 - RNA, 22 nt, synthetic construct
  source 1..22: mol_type = other RNA
caacctggaggactccatgctg

SEQ ID NO: 793 - RNA, 23 nt, synthetic construct
  source 1..23: mol_type = other RNA
agggccagaggagcctggagtgg

SEQ ID NO: 794 - RNA, 21 nt, synthetic construct
  source 1..21: mol_type = other RNA
gtggctgcactcacttccttc

SEQ ID NO: 795 - RNA, 22 nt, synthetic construct
  source 1..22: mol_type = other RNA
acccaggttccctctggccgca

SEQ ID NO: 796 - RNA, 21 nt, synthetic construct
  source 1..21: mol_type = other RNA
taaagtaaatatgcaccaaaa

SEQ ID NO: 797 - RNA, 21 nt, synthetic construct
  source 1..21: mol_type = other RNA
tacagtactgtgataactgaa

SEQ ID NO: 798 - RNA, 23 nt, synthetic construct
  source 1..23: mol_type = other RNA
tggagagagaaaagagacagaag

SEQ ID NO: 799 - RNA, 20 nt, synthetic construct
  source 1..20: mol_type = other RNA
tgggaatgggggtaagggcc

SEQ ID NO: 800 - RNA, 22 nt, synthetic construct
  source 1..22: mol_type = other RNA
gctctgacgaggttgcactact

SEQ ID NO: 801 - RNA, 22 nt, synthetic construct
  source 1..22: mol_type = other RNA
ctgaagctcagagggctctgat

SEQ ID NO: 802 - RNA, 23 nt, synthetic construct
  source 1..23: mol_type = other RNA
tgatggataaaagactacatatt

SEQ ID NO: 803 - RNA, 24 nt, synthetic construct
  source 1..24: mol_type = other RNA
agctgagctccatggacgtgcagt

SEQ ID NO: 804 - RNA, 22 nt, synthetic construct
  source 1..22: mol_type = other RNA
aactggccctcaaagtcccgct

SEQ ID NO: 805 - RNA, 24 nt, synthetic construct
  source 1..24: mol_type = other RNA
tcagaacaaatgccggttcccaga

SEQ ID NO: 806 - RNA, 22 nt, synthetic construct
  source 1..22: mol_type = other RNA
ctcaagatggaagcagtttctg

SEQ ID NO: 807 - RNA, 18 nt, synthetic construct
  source 1..18: mol_type = other RNA
tggacctctcctccccag

SEQ ID NO: 808 - RNA, 20 nt, synthetic construct
  source 1..20: mol_type = other RNA
aggcgcacccgaccacatgc

SEQ ID NO: 809 - RNA, 21 nt, synthetic construct
  source 1..21: mol_type = other RNA
tcaaatgcagatcctgacttc

SEQ ID NO: 810 - RNA, 22 nt, synthetic construct
  source 1..22: mol_type = other RNA
tgaggggtttggaatgggatgg

SEQ ID NO: 811 - RNA, 22 nt, synthetic construct
  source 1..22: mol_type = other RNA
aaagtgcttccctttggactgt

SEQ ID NO: 812 - RNA, 23 nt, synthetic construct
  source 1..23: mol_type = other RNA
tctgggaggttgtagcagtggaa

SEQ ID NO: 813 - RNA, 23 nt, synthetic construct
  source 1..23: mol_type = other RNA
tggttctcttgtggctcaagcgt

SEQ ID NO: 814 - RNA, 21 nt, synthetic construct
  source 1..21: mol_type = other RNA
atgcctcccccggccccgcag

SEQ ID NO: 815 - RNA, 23 nt, synthetic construct
  source 1..23: mol_type = other RNA
tgcaaaagtaattgcagtttttg

SEQ ID NO: 816 - RNA, 21 nt, synthetic construct
  source 1..21: mol_type = other RNA
atctgtctcgattgtttccag

SEQ ID NO: 817 - RNA, 22 nt, synthetic construct
  source 1..22: mol_type = other RNA
tgtgggttctgggttggggtga

SEQ ID NO: 818 - RNA, 24 nt, synthetic construct
  source 1..24: mol_type = other RNA
tgctgatggcagatgtcgggtctg

SEQ ID NO: 819 - RNA, 22 nt, synthetic construct
  source 1..22: mol_type = other RNA
gcccgcgtgtggagccaggtgt

SEQ ID NO: 820 - RNA, 21 nt, synthetic construct
  source 1..21: mol_type = other RNA
aataaagttcatgtatggcaa

SEQ ID NO: 821 - RNA, 22 nt, synthetic construct
  source 1..22: mol_type = other RNA
tggctcagttcagcaggaacag

SEQ ID NO: 822 - RNA, 22 nt, synthetic construct
  source 1..22: mol_type = other RNA
tggggaggtgtggagtcagcat

SEQ ID NO: 823 - RNA, 22 nt, synthetic construct
  source 1..22: mol_type = other RNA
tcaggtgtggaaactgaggcag

SEQ ID NO: 824 - RNA, 21 nt, synthetic construct
  source 1..21: mol_type = other RNA
tctagaaatgcatgacccacc

SEQ ID NO: 825 - RNA, 20 nt, synthetic construct
  source 1..20: mol_type = other RNA
cttcctcgtctgtctgcccc

SEQ ID NO: 826 - RNA, 22 nt, synthetic construct
  source 1..22: mol_type = other RNA
tacgtcatcgttgtcatcgtca

SEQ ID NO: 827 - RNA, 20 nt, synthetic construct
  source 1..20: mol_type = other RNA
aaaaggcattgtggtttttg

SEQ ID NO: 828 - RNA, 23 nt, synthetic construct
  source 1..23: mol_type = other RNA
ttgggcccaggagtaaacaggat

SEQ ID NO: 829 - RNA, 22 nt, synthetic construct
  source 1..22: mol_type = other RNA
tgtgactggttgaccagagggg

SEQ ID NO: 830 - RNA, 22 nt, synthetic construct
  source 1..22: mol_type = other RNA
tctgtgctactggatgaagagt

SEQ ID NO: 831 - RNA, 22 nt, synthetic construct
  source 1..22: mol_type = other RNA
cagggcctcactgtatcgccca

SEQ ID NO: 832 - RNA, 22 nt, synthetic construct
  source 1..22: mol_type = other RNA
tgggaaagacaaactcagagtt

SEQ ID NO: 833 - RNA, 22 nt, synthetic construct
  source 1..22: mol_type = other RNA
tcgggcctggggttgggggagc

SEQ ID NO: 834 - RNA, 21 nt, synthetic construct
  source 1..21: mol_type = other RNA
tggttctagacttgccaacta

SEQ ID NO: 835 - RNA, 22 nt, synthetic construct
  source 1..22: mol_type = other RNA
gactatagaactttccccctca

SEQ ID NO: 836 - RNA, 22 nt, synthetic construct
  source 1..22: mol_type = other RNA
actcaaaacccttcagtgactt

SEQ ID NO: 837 - RNA, 23 nt, synthetic construct
  source 1..23: mol_type = other RNA
agctggtgttgtgaatcaggccg

SEQ ID NO: 838 - RNA, 20 nt, synthetic construct
  source 1..20: mol_type = other RNA
ggctccttggtctaggggta

SEQ ID NO: 839 - RNA, 18 nt, synthetic construct
  source 1..18: mol_type = other RNA
aggctggagtgagcggag

SEQ ID NO: 840 - RNA, 23 nt, synthetic construct
  source 1..23: mol_type = other RNA
tcagcaccaggatattgttggag

SEQ ID NO: 841 - RNA, 21 nt, synthetic construct
  source 1..21: mol_type = other RNA
ataggactcatatagtgccag

SEQ ID NO: 842 - RNA, 17 nt, synthetic construct
  source 1..17: mol_type = other RNA
tgtcctctgttcctcag

SEQ ID NO: 843 - RNA, 22 nt, synthetic construct
  source 1..22: mol_type = other RNA
ttggaataggggatatctcagc

SEQ ID NO: 844 - RNA, 23 nt, synthetic construct
  source 1..23: mol_type = other RNA
agggacttttgggggcagatgtg

SEQ ID NO: 845 - RNA, 18 nt, synthetic construct
  source 1..18: mol_type = other RNA
gaaggacctgcaccttcg

SEQ ID NO: 846 - RNA, 22 nt, synthetic construct
  source 1..22: mol_type = other RNA
atcatacaaggacaatttcttt

SEQ ID NO: 847 - RNA, 22 nt, synthetic construct
  source 1..22: mol_type = other RNA
tatgtaatatggtccacatctt

SEQ ID NO: 848 - RNA, 19 nt, synthetic construct
  source 1..19: mol_type = other RNA
agagctggctgaagggcag

SEQ ID NO: 849 - RNA, 22 nt, synthetic construct
  source 1..22: mol_type = other RNA
caaaagtaattgtggattttgt

SEQ ID NO: 850 - RNA, 22 nt, synthetic construct
  source 1..22: mol_type = other RNA
tggcaccagcactggcggtgtc

SEQ ID NO: 851 - RNA, 22 nt, synthetic construct
  source 1..22: mol_type = other RNA
aaacaccattgtcacactccac

SEQ ID NO: 852 - RNA, 22 nt, synthetic construct
  source 1..22: mol_type = other RNA
cactggctcctttctgggtaga

SEQ ID NO: 853 - RNA, 22 nt, synthetic construct
  source 1..22: mol_type = other RNA
tagggggcggcttgtggagtgt

SEQ ID NO: 854 - RNA, 22 nt, synthetic construct
  source 1..22: mol_type = other RNA
aagcaatactgttacctgaaat

SEQ ID NO: 855 - RNA, 21 nt, synthetic construct
  source 1..21: mol_type = other RNA
taggcctttagatcacttaaa

SEQ ID NO: 856 - RNA, 22 nt, synthetic construct
  source 1..22: mol_type = other RNA
ctatacggcctcctagctttcc

SEQ ID NO: 857 - RNA, 22 nt, synthetic construct
  source 1..22: mol_type = other RNA
aggaccttccctgaaccaagga

SEQ ID NO: 858 - RNA, 22 nt, synthetic construct
  source 1..22: mol_type = other RNA
ctctctggccgtctaccttcca

SEQ ID NO: 859 - RNA, 21 nt, synthetic construct
  source 1..21: mol_type = other RNA
tgcccttctctcctcctgcct

SEQ ID NO: 860 - RNA, 22 nt, synthetic construct
  source 1..22: mol_type = other RNA
tggggcggagcttccggaggcc

SEQ ID NO: 861 - RNA, 23 nt, synthetic construct
  source 1..23: mol_type = other RNA
tgaggctctgttagccttggctc

SEQ ID NO: 862 - RNA, 22 nt, synthetic construct
  source 1..22: mol_type = other RNA
taacaaacacctgtaaaacagc

SEQ ID NO: 863 - RNA, 21 nt, synthetic construct
  source 1..21: mol_type = other RNA
cccatgcctcctgccgcggtc

SEQ ID NO: 864 - RNA, 21 nt, synthetic construct
  source 1..21: mol_type = other RNA
tggactgccctgatctggaga

SEQ ID NO: 865 - RNA, 23 nt, synthetic construct
  source 1..23: mol_type = other RNA
tgaggatatggcagggaagggga

SEQ ID NO: 866 - RNA, 22 nt, synthetic construct
  source 1..22: mol_type = other RNA
ccagactgtggctgaccagagg

SEQ ID NO: 867 - RNA, 23 nt, synthetic construct
  source 1..23: mol_type = other RNA
tgtgtgtgtagaggaagaaggga

SEQ ID NO: 868 - RNA, 21 nt, synthetic construct
  source 1..21: mol_type = other RNA
aaaagtaattgcggtttttgc

SEQ ID NO: 869 - RNA, 23 nt, synthetic construct
  source 1..23: mol_type = other RNA
cggggccgtagcactgtctgaga

SEQ ID NO: 870 - RNA, 19 nt, synthetic construct
  source 1..19: mol_type = other RNA
cggggtcggcggcgacgtg

SEQ ID NO: 871 - RNA, 22 nt, synthetic construct
  source 1..22: mol_type = other RNA
ttcatttgcctcccagcctaca

SEQ ID NO: 872 - RNA, 22 nt, synthetic construct
  source 1..22: mol_type = other RNA
cgaatcattatttgctgctcta

SEQ ID NO: 873 - RNA, 24 nt, synthetic construct
  source 1..24: mol_type = other RNA
tgtcagtgactcctgccccttggt

SEQ ID NO: 874 - RNA, 19 nt, synthetic construct
  source 1..19: mol_type = other RNA
agaggtaggtgtggaagaa

SEQ ID NO: 875 - RNA, 22 nt, synthetic construct
  source 1..22: mol_type = other RNA
taggtagtttcctgttgttggg

SEQ ID NO: 876 - RNA, 22 nt, synthetic construct
  source 1..22: mol_type = other RNA
agacagtagttcttgcctggtt

SEQ ID NO: 877 - RNA, 23 nt, synthetic construct
  source 1..23: mol_type = other RNA
aacattcattgctgtcggtgggt

SEQ ID NO: 878 - RNA, 22 nt, synthetic construct
  source 1..22: mol_type = other RNA
agatgtccagccacaattctcg

SEQ ID NO: 879 - RNA, 22 nt, synthetic construct
  source 1..22: mol_type = other RNA
tgctcaggttgcacagctggga

SEQ ID NO: 880 - RNA, 21 nt, synthetic construct
  source 1..21: mol_type = other RNA
agcggtgctcctgcgggccga

SEQ ID NO: 881 - RNA, 23 nt, synthetic construct
  source 1..23: mol_type = other RNA
cctcagggctgtagaacagggct

SEQ ID NO: 882 - RNA, 22 nt, synthetic construct
  source 1..22: mol_type = other RNA
cccctggggctgggcaggcgga

SEQ ID NO: 883 - RNA, 23 nt, synthetic construct
  source 1..23: mol_type = other RNA
aggttacccgagcaactttgcat

SEQ ID NO: 884 - RNA, 23 nt, synthetic construct
  source 1..23: mol_type = other RNA
tactccagagggcgtcactcatg

SEQ ID NO: 885 - RNA, 22 nt, synthetic construct
  source 1..22: mol_type = other RNA
tgtcctctagggcctgcagtct

SEQ ID NO: 886 - RNA, 22 nt, synthetic construct
  source 1..22: mol_type = other RNA
tgtgacaatagagatgaacatg

SEQ ID NO: 887 - RNA, 22 nt, synthetic construct
  source 1..22: mol_type = other RNA
gtgcggaacgctggccggggcg

SEQ ID NO: 888 - RNA, 22 nt, synthetic construct
  source 1..22: mol_type = other RNA
tgcgacattggaagtagtatca

SEQ ID NO: 889 - RNA, 21 nt, synthetic construct
  source 1..21: mol_type = other RNA
tttccataggtgatgagtcac

SEQ ID NO: 890 - RNA, 22 nt, synthetic construct
  source 1..22: mol_type = other RNA
gctccctctagggtcgctcgga

SEQ ID NO: 891 - RNA, 22 nt, synthetic construct
  source 1..22: mol_type = other RNA
cgcacctgcctctcacccacag

SEQ ID NO: 892 - RNA, 21 nt, synthetic construct
  source 1..21: mol_type = other RNA
attgaaacctctaagagtgga

SEQ ID NO: 893 - RNA, 22 nt, synthetic construct
  source 1..22: mol_type = other RNA
tagtaccagtaccttgtgttca

SEQ ID NO: 894 - RNA, 19 nt, synthetic construct
  source 1..19: mol_type = other RNA
aaaagtaattgcggtcttt

SEQ ID NO: 895 - RNA, 22 nt, synthetic construct
  source 1..22: mol_type = other RNA
cggggttttgagggcgagatga

SEQ ID NO: 896 - RNA, 20 nt, synthetic construct
  source 1..20: mol_type = other RNA
cctgatcccacagcccacct

SEQ ID NO: 897 - RNA, 22 nt, synthetic construct
  source 1..22: mol_type = other RNA
tttgaggctacagtgagatgtg

SEQ ID NO: 898 - RNA, 20 nt, synthetic construct
  source 1..20: mol_type = other RNA
gatattcagaggctaggtgg

SEQ ID NO: 899 - RNA, 19 nt, synthetic construct
  source 1..19: mol_type = other RNA
tggcccaagacctcagacc

SEQ ID NO: 900 - RNA, 23 nt, synthetic construct
  source 1..23: mol_type = other RNA
agtgcctgagggagtaagagccc

SEQ ID NO: 901 - RNA, 23 nt, synthetic construct
  source 1..23: mol_type = other RNA
gaagacttcttggattacagggg

SEQ ID NO: 902 - RNA, 22 nt, synthetic construct
  source 1..22: mol_type = other RNA
cagcaggggagagagaggagtc

SEQ ID NO: 903 - RNA, 23 nt, synthetic construct
  source 1..23: mol_type = other RNA
tgaggatggatagcaaggaagcc

SEQ ID NO: 904 - RNA, 20 nt, synthetic construct
  source 1..20: mol_type = other RNA
cgggcgtggtggtgggggtg

SEQ ID NO: 905 - RNA, 19 nt, synthetic construct
  source 1..19: mol_type = other RNA
tgagggagttgggtgtata

SEQ ID NO: 906 - RNA, 22 nt, synthetic construct
  source 1..22: mol_type = other RNA
ttggggattgggtcaggccagt

SEQ ID NO: 907 - RNA, 23 nt, synthetic construct
  source 1..23: mol_type = other RNA
tctgtcatttctttaggccaata

SEQ ID NO: 908 - RNA, 21 nt, synthetic construct
  source 1..21: mol_type = other RNA
tggctcccttctctccgtctg

SEQ ID NO: 909 - RNA, 22 nt, synthetic construct
  source 1..22: mol_type = other RNA
ctgggaggtggatgtttacttc

SEQ ID NO: 910 - RNA, 21 nt, synthetic construct
  source 1..21: mol_type = other RNA
tggctgttggagggggcaggc

SEQ ID NO: 911 - RNA, 21 nt, synthetic construct
  source 1..21: mol_type = other RNA
cctctacagggaagcgctttc

SEQ ID NO: 912 - RNA, 22 nt, synthetic construct
  source 1..22: mol_type = other RNA
tctggctatctcacgagactgt

SEQ ID NO: 913 - RNA, 20 nt, synthetic construct
  source 1..20: mol_type = other RNA
tcctgccacctcctccgcag

SEQ ID NO: 914 - RNA, 23 nt, synthetic construct
  source 1..23: mol_type = other RNA
ttctcgaggaaagaagcactttc

SEQ ID NO: 915 - RNA, 24 nt, synthetic construct
  source 1..24: mol_type = other RNA
tgtaggcatgaggcagggcccagg

SEQ ID NO: 916 - RNA, 23 nt, synthetic construct
  source 1..23: mol_type = other RNA
tagcaccatttgaaatcagtgtt

SEQ ID NO: 917 - RNA, 22 nt, synthetic construct
  source 1..22: mol_type = other RNA
tgggatccagacagtgggagaa

SEQ ID NO: 918 - RNA, 22 nt, synthetic construct
  source 1..22: mol_type = other RNA
ttattcattcacaaaagcttta

SEQ ID NO: 919 - RNA, 21 nt, synthetic construct
  source 1..21: mol_type = other RNA
atgtcccacccccactcctgt

SEQ ID NO: 920 - RNA, 22 nt, synthetic construct
  source 1..22: mol_type = other RNA
tgttgtcatgttttttccctag

SEQ ID NO: 921 - RNA, 22 nt, synthetic construct
  source 1..22: mol_type = other RNA
tttcttcttagacatggcagct

SEQ ID NO: 922 - RNA, 23 nt, synthetic construct
  source 1..23: mol_type = other RNA
tttgggattgacgccacatgtct

SEQ ID NO: 923 - RNA, 22 nt, synthetic construct
  source 1..22: mol_type = other RNA
cgggactgtagagggcatgagc

SEQ ID NO: 924 - RNA, 20 nt, synthetic construct
  source 1..20: mol_type = other RNA
tctcgcatcaggaggcaagg

SEQ ID NO: 925 - RNA, 21 nt, synthetic construct
  source 1..21: mol_type = other RNA
tgtcttgcaggccgtcatgca

SEQ ID NO: 926 - RNA, 21 nt, synthetic construct
  source 1..21: mol_type = other RNA
tatatatacagccatgcactc

SEQ ID NO: 927 - RNA, 24 nt, synthetic construct
  source 1..24: mol_type = other RNA
aggctgtgatgctctcctgagccc

SEQ ID NO: 928 - RNA, 21 nt, synthetic construct
  source 1..21: mol_type = other RNA
aaaagtaattgcagtttttgc

SEQ ID NO: 929 - RNA, 22 nt, synthetic construct
  source 1..22: mol_type = other RNA
taatactgcctggtaatgatga

SEQ ID NO: 930 - RNA, 23 nt, synthetic construct
  source 1..23: mol_type = other RNA
cacacaggaaaagcggggccctg

SEQ ID NO: 931 - RNA, 22 nt, synthetic construct
  source 1..22: mol_type = other RNA
atcatgtatgatactgcaaaca

SEQ ID NO: 932 - RNA, 24 nt, synthetic construct
  source 1..24: mol_type = other RNA
aggagggaggagatgggccaagtt

SEQ ID NO: 933 - RNA, 17 nt, synthetic construct
  source 1..17: mol_type = other RNA
gggatatgaagaaaaat

SEQ ID NO: 934 - RNA, 22 nt, synthetic construct
  source 1..22: mol_type = other RNA
tcgggcgcaagagcactgcagt

SEQ ID NO: 935 - RNA, 22 nt, synthetic construct
  source 1..22: mol_type = other RNA
ttttcaactctaatgggagaga

SEQ ID NO: 936 - RNA, 22 nt, synthetic construct
  source 1..22: mol_type = other RNA
atccgcgctctgactctctgcc

SEQ ID NO: 937 - RNA, 21 nt, synthetic construct
  source 1..21: mol_type = other RNA
ctggatggctcctccatgtct

SEQ ID NO: 938 - RNA, 22 nt, synthetic construct
  source 1..22: mol_type = other RNA
gctcatccccatctcctttcag

SEQ ID NO: 939 - RNA, 21 nt, synthetic construct
  source 1..21: mol_type = other RNA
caccgactctgtctcctgcag

SEQ ID NO: 940 - RNA, 21 nt, synthetic construct
  source 1..21: mol_type = other RNA
actgacaggagagcattttga

SEQ ID NO: 941 - RNA, 20 nt, synthetic construct
  source 1..20: mol_type = other RNA
tcttactccctcaggcactg

SEQ ID NO: 942 - RNA, 21 nt, synthetic construct
  source 1..21: mol_type = other RNA
aaactactgaaaatcaaagat

SEQ ID NO: 943 - RNA, 23 nt, synthetic construct
  source 1..23: mol_type = other RNA
atcaacagacattaattgggcgc

SEQ ID NO: 944 - RNA, 22 nt, synthetic construct
  source 1..22: mol_type = other RNA
aagtgcctccttttagagtgtt

SEQ ID NO: 945 - RNA, 19 nt, synthetic construct
  source 1..19: mol_type = other RNA
tggggcggagcttccggag

SEQ ID NO: 946 - RNA, 21 nt, synthetic construct
  source 1..21: mol_type = other RNA
tcgaggagctcacagtctagt

SEQ ID NO: 947 - RNA, 20 nt, synthetic construct
  source 1..20: mol_type = other RNA
actgggcttggagtcagaag

SEQ ID NO: 948 - RNA, 22 nt, synthetic construct
  source 1..22: mol_type = other RNA
actgatttcttttggtgttcag

SEQ ID NO: 949 - RNA, 21 nt, synthetic construct
  source 1..21: mol_type = other RNA
ccctcatcttcccctcctttc

SEQ ID NO: 950 - RNA, 22 nt, synthetic construct
  source 1..22: mol_type = other RNA
aacgcacttccctttagagtgt

SEQ ID NO: 951 - RNA, 21 nt, synthetic construct
  source 1..21: mol_type = other RNA
ttgcctgccctcttcctccag

SEQ ID NO: 952 - RNA, 23 nt, synthetic construct
  source 1..23: mol_type = other RNA
tctctggagggaagcactttctg

SEQ ID NO: 953 - RNA, 19 nt, synthetic construct
  source 1..19: mol_type = other RNA
aagcagctgcctctgaggc

SEQ ID NO: 954 - RNA, 22 nt, synthetic construct
  source 1..22: mol_type = other RNA
ttacggaccagctaagggaggc

SEQ ID NO: 955 - RNA, 22 nt, synthetic construct
  source 1..22: mol_type = other RNA
gagcttattcataaaagtgcag

SEQ ID NO: 956 - RNA, 17 nt, synthetic construct
  source 1..17: mol_type = other RNA
tcgcctcctcctctccc

SEQ ID NO: 957 - RNA, 17 nt, synthetic construct
  source 1..17: mol_type = other RNA
ggggtggtctgttgttg

SEQ ID NO: 958 - RNA, 22 nt, synthetic construct
  source 1..22: mol_type = other RNA
aggagagtggattccaggtggt

SEQ ID NO: 959 - RNA, 21 nt, synthetic construct
  source 1..21: mol_type = other RNA
tgtgtcccattattggtgatt

SEQ ID NO: 960 - RNA, 22 nt, synthetic construct
  source 1..22: mol_type = other RNA
tcagtgcactacagaactttgt

SEQ ID NO: 961 - RNA, 21 nt, synthetic construct
  source 1..21: mol_type = other RNA
ggtggggcaatgggatcaggt

SEQ ID NO: 962 - RNA, 23 nt, synthetic construct
  source 1..23: mol_type = other RNA
gtcctccaggccatgagctgcgg

SEQ ID NO: 963 - RNA, 21 nt, synthetic construct
  source 1..21: mol_type = other RNA
gaaagtacagatcggatgggt

SEQ ID NO: 964 - RNA, 23 nt, synthetic construct
  source 1..23: mol_type = other RNA
tggtcgaccagttggaaagtaat

SEQ ID NO: 965 - RNA, 22 nt, synthetic construct
  source 1..22: mol_type = other RNA
tttctatttctcagtggggctc

SEQ ID NO: 966 - RNA, 21 nt, synthetic construct
  source 1..21: mol_type = other RNA
tggccctttgtacccctccag

SEQ ID NO: 967 - RNA, 22 nt, synthetic construct
  source 1..22: mol_type = other RNA
agctctagaaagattgttgacc

SEQ ID NO: 968 - RNA, 22 nt, synthetic construct
  source 1..22: mol_type = other RNA
cgaaaacagcaattacctttgc

SEQ ID NO: 969 - RNA, 21 nt, synthetic construct
  source 1..21: mol_type = other RNA
atttgtgcttggctctgtcac

SEQ ID NO: 970 - RNA, 21 nt, synthetic construct
  source 1..21: mol_type = other RNA
tcagctcctctctacccacag

SEQ ID NO: 971 - RNA, 22 nt, synthetic construct
  source 1..22: mol_type = other RNA
tgcctaggctgagactgcagtg

SEQ ID NO: 972 - RNA, 23 nt, synthetic construct
  source 1..23: mol_type = other RNA
aggcctctgtgacgtcacggtgt

SEQ ID NO: 973 - RNA, 23 nt, synthetic construct
  source 1..23: mol_type = other RNA
cccactgccccaggtgctgctgg

SEQ ID NO: 974 - RNA, 21 nt, synthetic construct
  source 1..21: mol_type = other RNA
acagtctgctgaggttggagc

SEQ ID NO: 975 - RNA, 19 nt, synthetic construct
  source 1..19: mol_type = other RNA
gtcctaggaggctcctctg

SEQ ID NO: 976 - RNA, 21 nt, synthetic construct
  source 1..21: mol_type = other RNA
tcttgtgttctctagatcagt

SEQ ID NO: 977 - RNA, 23 nt, synthetic construct
  source 1..23: mol_type = other RNA
ctgcagccacttggggaactggt

SEQ ID NO: 978 - RNA, 24 nt, synthetic construct
  source 1..24: mol_type = other RNA
acaaagtgcttccctttagagtgt

SEQ ID NO: 979 - RNA, 18 nt, synthetic construct
  source 1..18: mol_type = other RNA
tcagctggccctcatttc

SEQ ID NO: 980 - RNA, 21 nt, synthetic construct
  source 1..21: mol_type = other RNA
taaggcacccttctgagtaga

SEQ ID NO: 981 - RNA, 22 nt, synthetic construct
  source 1..22: mol_type = other RNA
atgcaggcctgtgtacagcact

SEQ ID NO: 982 - RNA, 25 nt, synthetic construct
  source 1..25: mol_type = other RNA
tcggggcatgggggagggaggctgg

SEQ ID NO: 983 - RNA, 22 nt, synthetic construct
  source 1..22: mol_type = other RNA
tgtgggtgggaaggactggatt

SEQ ID NO: 984 - RNA, 22 nt, synthetic construct
  source 1..22: mol_type = other RNA
ctgcagactcgacctcccaggc

SEQ ID NO: 985 - RNA, 22 nt, synthetic construct
  source 1..22: mol_type = other RNA
tgctatgccaacatattgccat

SEQ ID NO: 986 - RNA, 21 nt, synthetic construct
  source 1..21: mol_type = other RNA
tcttcaacctcaggacttgca

SEQ ID NO: 987 - RNA, 22 nt, synthetic construct
  source 1..22: mol_type = other RNA
catcagaattcatggaggctag

SEQ ID NO: 988 - RNA, 22 nt, synthetic construct
  source 1..22: mol_type = other RNA
tttcctgtcctccaaccagacc

SEQ ID NO: 989 - RNA, 22 nt, synthetic construct
  source 1..22: mol_type = other RNA
atagtggttgtgaatttacctt

SEQ ID NO: 990 - RNA, 22 nt, synthetic construct
  source 1..22: mol_type = other RNA
agaaagggtggcaatacctctt

SEQ ID NO: 991 - RNA, 23 nt, synthetic construct
  source 1..23: mol_type = other RNA
aaaggtcattgtaaggttaatgc

SEQ ID NO: 992 - RNA, 20 nt, synthetic construct
  source 1..20: mol_type = other RNA
cttatatcagaggctgtggg

SEQ ID NO: 993 - RNA, 23 nt, synthetic construct
  source 1..23: mol_type = other RNA
ttgttctcaaactggctgtcaga

SEQ ID NO: 994 - RNA, 23 nt, synthetic construct
  source 1..23: mol_type = other RNA
ttgggagggaagacagctggaga

SEQ ID NO: 995 - RNA, 22 nt, synthetic construct
  source 1..22: mol_type = other RNA
ttcacccctctcacctaagcag

SEQ ID NO: 996 - RNA, 22 nt, synthetic construct
  source 1..22: mol_type = other RNA
tcaggctcagtcccctcccgat

SEQ ID NO: 997 - RNA, 21 nt, synthetic construct
  source 1..21: mol_type = other RNA
aatcattcacggacaacactt

SEQ ID NO: 998 - RNA, 24 nt, synthetic construct
  source 1..24: mol_type = other RNA
tgagaaggcacagcttgcacgtga

SEQ ID NO: 999 - RNA, 22 nt, synthetic construct
  source 1..22: mol_type = other RNA
ttggccaccacacctacccctt

SEQ ID NO: 1000 - RNA, 22 nt, synthetic construct
  source 1..22: mol_type = other RNA
ttgtggatctcaaggatgtgct

SEQ ID NO: 1001 - RNA, 23 nt, synthetic construct
  source 1..23: mol_type = other RNA
tgggggctgggatgggccatggt

SEQ ID NO: 1002 - RNA, 23 nt, synthetic construct
  source 1..23: mol_type = other RNA
ctgggcccgcggcgggcgtgggg

SEQ ID NO: 1003 - RNA, 22 nt, synthetic construct
  source 1..22: mol_type = other RNA
taaggcacgcggtgaatgccaa

SEQ ID NO: 1004 - RNA, 22 nt, synthetic construct
  source 1..22: mol_type = other RNA
aactagtaatgttggattaggg

SEQ ID NO: 1005 - RNA, 21 nt, synthetic construct
  source 1..21: mol_type = other RNA
aaaagcatcaggaagtaccca

SEQ ID NO: 1006 - RNA, 22 nt, synthetic construct
  source 1..22: mol_type = other RNA
aatcatgtgcagtgccaatatg

SEQ ID NO: 1007 - RNA, 17 nt, synthetic construct
  source 1..17: mol_type = other RNA
acagggaggagattgta

SEQ ID NO: 1008 - RNA, 17 nt, synthetic construct
  source 1..17: mol_type = other RNA
gtggacctggctgggac

SEQ ID NO: 1009 - RNA, 21 nt, synthetic construct
  source 1..21: mol_type = other RNA
tgactaactcccactctacag

SEQ ID NO: 1010 - RNA, 21 nt, synthetic construct
  source 1..21: mol_type = other RNA
gagccagtggtgagacagtga

SEQ ID NO: 1011 - RNA, 24 nt, synthetic construct
  source 1..24: mol_type = other RNA
ccagacagaattctatgcactttc

SEQ ID NO: 1012 - RNA, 19 nt, synthetic construct
  source 1..19: mol_type = other RNA
aaaagctgggttgagagga

SEQ ID NO: 1013 - RNA, 23 nt, synthetic construct
  source 1..23: mol_type = other RNA
ctcttgagggaagcactttctgt

SEQ ID NO: 1014 - RNA, 22 nt, synthetic construct
  source 1..22: mol_type = other RNA
gtgggctgggctgggctgggcc

SEQ ID NO: 1015 - RNA, 21 nt, synthetic construct
  source 1..21: mol_type = other RNA
tggccaaaaagcaggcagaga

SEQ ID NO: 1016 - RNA, 22 nt, synthetic construct
  source 1..22: mol_type = other RNA
ttcaacgggtatttattgagca

SEQ ID NO: 1017 - RNA, 22 nt, synthetic construct
  source 1..22: mol_type = other RNA
taggggcagcagaggacctggg

SEQ ID NO: 1018 - RNA, 21 nt, synthetic construct
  source 1..21: mol_type = other RNA
agctacatctggctactgggt

SEQ ID NO: 1019 - RNA, 22 nt, synthetic construct
  source 1..22: mol_type = other RNA
agacttcccatttgaaggtggc

SEQ ID NO: 1020 - RNA, 18 nt, synthetic construct
  source 1..18: mol_type = other RNA
gcggcgagtccgactcat

SEQ ID NO: 1021 - RNA, 21 nt, synthetic construct
  source 1..21: mol_type = other RNA
acaccctctttccctaccgcc

SEQ ID NO: 1022 - RNA, 21 nt, synthetic construct
  source 1..21: mol_type = other RNA
ttgctcactgttcttccctag

SEQ ID NO: 1023 - RNA, 22 nt, synthetic construct
  source 1..22: mol_type = other RNA
tgtctatactctgtcactttac

SEQ ID NO: 1024 - RNA, 17 nt, synthetic construct
  source 1..17: mol_type = other RNA
ttcaagtaattcaggtg

SEQ ID NO: 1025 - RNA, 22 nt, synthetic construct
  source 1..22: mol_type = other RNA
tatgtagtagtcaaaggcattt

SEQ ID NO: 1026 - RNA, 20 nt, synthetic construct
  source 1..20: mol_type = other RNA
tcactgttcagacaggcgga

SEQ ID NO: 1027 - RNA, 21 nt, synthetic construct
  source 1..21: mol_type = other RNA
tgactctgcctgtaggccggt

SEQ ID NO: 1028 - RNA, 22 nt, synthetic construct
  source 1..22: mol_type = other RNA
aatcactaaccacacggccagg

SEQ ID NO: 1029 - RNA, 22 nt, synthetic construct
  source 1..22: mol_type = other RNA
tctcaccccaactctgccccag

SEQ ID NO: 1030 - RNA, 23 nt, synthetic construct
  source 1..23: mol_type = other RNA
tctgctcataccccatggtttct

SEQ ID NO: 1031 - RNA, 22 nt, synthetic construct
  source 1..22: mol_type = other RNA
ctcgggagggcatgggccaggc

SEQ ID NO: 1032 - RNA, 22 nt, synthetic construct
  source 1..22: mol_type = other RNA
attcttcctgccctggctccat

SEQ ID NO: 1033 - RNA, 21 nt, synthetic construct
  source 1..21: mol_type = other RNA
agagaagaagatcagcctgca

SEQ ID NO: 1034 - RNA, 21 nt, synthetic construct
  source 1..21: mol_type = other RNA
tggatgtggaaggagttatct

SEQ ID NO: 1035 - RNA, 21 nt, synthetic construct
  source 1..21: mol_type = other RNA
cggcgcccgtgtctcctccag

SEQ ID NO: 1036 - RNA, 23 nt, synthetic construct
  source 1..23: mol_type = other RNA
cctgtgggccacctagtcaccaa

SEQ ID NO: 1037 - RNA, 22 nt, synthetic construct
  source 1..22: mol_type = other RNA
acagtagagggaggaatcgcag

SEQ ID NO: 1038 - RNA, 25 nt, synthetic construct
  source 1..25: mol_type = other RNA
ctagtgagggacagaaccaggattc

SEQ ID NO: 1039 - RNA, 22 nt, synthetic construct
  source 1..22: mol_type = other RNA
aactggcctacaaagtcccagt

SEQ ID NO: 1040 - RNA, 21 nt, synthetic construct
  source 1..21: mol_type = other RNA
agaggataccctttgtatgtt

SEQ ID NO: 1041 - RNA, 20 nt, synthetic construct
  source 1..20: mol_type = other RNA
cctgagcccgggccgcgcag

SEQ ID NO: 1042 - RNA, 23 nt, synthetic construct
  source 1..23: mol_type = other RNA
acagaggacagtggagtgtgagc

SEQ ID NO: 1043 - RNA, 21 nt, synthetic construct
  source 1..21: mol_type = other RNA
accctcgtcaggtccccgggg

SEQ ID NO: 1044 - RNA, 21 nt, synthetic construct
  source 1..21: mol_type = other RNA
tttctctctccacttcctcag

SEQ ID NO: 1045 - RNA, 22 nt, synthetic construct
  source 1..22: mol_type = other RNA
tacgtagatatatatgtatttt

SEQ ID NO: 1046 - RNA, 23 nt, synthetic construct
  source 1..23: mol_type = other RNA
cggcccgggctgctgctgttcct

SEQ ID NO: 1047 - RNA, 23 nt, synthetic construct
  source 1..23: mol_type = other RNA
cttgccatcctggtccactgcat

SEQ ID NO: 1048 - RNA, 22 nt, synthetic construct
  source 1..22: mol_type = other RNA
tgcctggaacatagtagggact

SEQ ID NO: 1049 - RNA, 22 nt, synthetic construct
  source 1..22: mol_type = other RNA
ataagacgagcaaaaagcttgt

SEQ ID NO: 1050 - RNA, 22 nt, synthetic construct
  source 1..22: mol_type = other RNA
ctgggagaaggctgtttactct

SEQ ID NO: 1051 - RNA, 22 nt, synthetic construct
  source 1..22: mol_type = other RNA
ctttcagtcggatgtttacagc

SEQ ID NO: 1052 - RNA, 23 nt, synthetic construct
  source 1..23: mol_type = other RNA
tctggctccgtgtcttcactccc

SEQ ID NO: 1053 - RNA, 22 nt, synthetic construct
  source 1..22: mol_type = other RNA
actgggaagaggagctgaggga

SEQ ID NO: 1054 - RNA, 22 nt, synthetic construct
  source 1..22: mol_type = other RNA
gtggagtcctggggaatggaga

SEQ ID NO: 1055 - RNA, 21 nt, synthetic construct
  source 1..21: mol_type = other RNA
acaggtcctaagagactgcat

SEQ ID NO: 1056 - RNA, 23 nt, synthetic construct
  source 1..23: mol_type = other RNA
agctacattgtctgctgggtttc

SEQ ID NO: 1057 - RNA, 22 nt, synthetic construct
  source 1..22: mol_type = other RNA
cctctaaagggaagcgctttct

SEQ ID NO: 1058 - RNA, 23 nt, synthetic construct
  source 1..23: mol_type = other RNA
taggagctcaacagatgcctgtt

SEQ ID NO: 1059 - RNA, 21 nt, synthetic construct
  source 1..21: mol_type = other RNA
tgctgtattgtcaggtagtga

SEQ ID NO: 1060 - RNA, 22 nt, synthetic construct
  source 1..22: mol_type = other RNA
actgtagtatgggcacttccag

SEQ ID NO: 1061 - RNA, 23 nt, synthetic construct
  source 1..23: mol_type = other RNA
aatcggacccatttaaaccggag

SEQ ID NO: 1062 - RNA, 21 nt, synthetic construct
  source 1..21: mol_type = other RNA
aatggcgccactagggttgtg

SEQ ID NO: 1063 - RNA, 20 nt, synthetic construct
  source 1..20: mol_type = other RNA
atgcgaggatgctgacagtg

SEQ ID NO: 1064 - RNA, 22 nt, synthetic construct
  source 1..22: mol_type = other RNA
gctgcgggctgcggtcagggcg

SEQ ID NO: 1065 - RNA, 22 nt, synthetic construct
  source 1..22: mol_type = other RNA
ctcggcgcggggcgcgggctcc

SEQ ID NO: 1066 - RNA, 22 nt, synthetic construct
  source 1..22: mol_type = other RNA
tctggtaagagatttgggcata

SEQ ID NO: 1067 - RNA, 19 nt, synthetic construct
  source 1..19: mol_type = other RNA
cttggggcatggagtccca

SEQ ID NO: 1068 - RNA, 22 nt, synthetic construct
  source 1..22: mol_type = other RNA
agcttccatgactcctgatgga

SEQ ID NO: 1069 - RNA, 23 nt, synthetic construct
  source 1..23: mol_type = other RNA
ctaatagtatctaccacaataaa

SEQ ID NO: 1070 - RNA, 22 nt, synthetic construct
  source 1..22: mol_type = other RNA
ttagccaattgtccatctttag

SEQ ID NO: 1071 - RNA, 22 nt, synthetic construct
  source 1..22: mol_type = other RNA
aggtattgccaccctttctagt

SEQ ID NO: 1072 - RNA, 20 nt, synthetic construct
  source 1..20: mol_type = other RNA
ttccgccagtcggtggccgg

SEQ ID NO: 1073 - RNA, 22 nt, synthetic construct
  source 1..22: mol_type = other RNA
tgggaacttagtagaggtttaa

SEQ ID NO: 1074 - RNA, 22 nt, synthetic construct
  source 1..22: mol_type = other RNA
ctagcacacagatacgcccaga

SEQ ID NO: 1075 - RNA, 21 nt, synthetic construct
  source 1..21: mol_type = other RNA
taacagtctccagtcacggcc

SEQ ID NO: 1076 - RNA, 20 nt, synthetic construct
  source 1..20: mol_type = other RNA
cggcggggctcggagccggg

SEQ ID NO: 1077 - RNA, 19 nt, synthetic construct
  source 1..19: mol_type = other RNA
gtgaggactcgggaggtgg

SEQ ID NO: 1078 - RNA, 22 nt, synthetic construct
  source 1..22: mol_type = other RNA
tgatcaggcaaaattgcagact

SEQ ID NO: 1079 - RNA, 21 nt, synthetic construct
  source 1..21: mol_type = other RNA
tctctggtctttccttgacag

SEQ ID NO: 1080 - RNA, 22 nt, synthetic construct
  source 1..22: mol_type = other RNA
aagggcttcctctctgcaggac

SEQ ID NO: 1081 - RNA, 21 nt, synthetic construct
  source 1..21: mol_type = other RNA
tctgaatagagtctgaagagt

SEQ ID NO: 1082 - RNA, 22 nt, synthetic construct
  source 1..22: mol_type = other RNA
tttgggactgatcttgatgtct

SEQ ID NO: 1083 - RNA, 21 nt, synthetic construct
  source 1..21: mol_type = other RNA
aaaacggtgagattttgtttt

SEQ ID NO: 1084 - RNA, 22 nt, synthetic construct
  source 1..22: mol_type = other RNA
tgtcttctctcctcccaaacag

SEQ ID NO: 1085 - RNA, 20 nt, synthetic construct
  source 1..20: mol_type = other RNA
atgtataaatgtatacacac

SEQ ID NO: 1086 - RNA, 22 nt, synthetic construct
  source 1..22: mol_type = other RNA
gaaggcagcagtgctcccctgt

SEQ ID NO: 1087 - RNA, 22 nt, synthetic construct
  source 1..22: mol_type = other RNA
ttgtgtcaatatgcgatgatgt

SEQ ID NO: 1088 - RNA, 22 nt, synthetic construct
  source 1..22: mol_type = other RNA
gtgggtgctggtgggagccgtg

SEQ ID NO: 1089 - RNA, 25 nt, synthetic construct
  source 1..25: mol_type = other RNA
tgccccatctgtgccctgggtagga

SEQ ID NO: 1090 - RNA, 22 nt, synthetic construct
  source 1..22: mol_type = other RNA
atgaagtgcactcatgatatgt

SEQ ID NO: 1091 - RNA, 22 nt, synthetic construct
  source 1..22: mol_type = other RNA
ttttttgctggaacatttctgg

SEQ ID NO: 1092 - RNA, 22 nt, synthetic construct
  source 1..22: mol_type = other RNA
caccagggcagagcagggctga

SEQ ID NO: 1093 - RNA, 21 nt, synthetic construct
  source 1..21: mol_type = other RNA
cctctacagggaagcgctttc

SEQ ID NO: 1094 - RNA, 21 nt, synthetic construct
  source 1..21: mol_type = other RNA
aaggcagggcccccgctcccc

SEQ ID NO: 1095 - RNA, 22 nt, synthetic construct
  source 1..22: mol_type = other RNA
cagtgcctcggcagtgcagccc

SEQ ID NO: 1096 - RNA, 21 nt, synthetic construct
  source 1..21: mol_type = other RNA
ttggccacaatgggttagaac

SEQ ID NO: 1097 - RNA, 23 nt, synthetic construct
  source 1..23: mol_type = other RNA
gaaaatcctttttgtttttccag

SEQ ID NO: 1098 - RNA, 21 nt, synthetic construct
  source 1..21: mol_type = other RNA
actctagctgccaaaggcgct

SEQ ID NO: 1099 - RNA, 23 nt, synthetic construct
  source 1..23: mol_type = other RNA
ggtctaggcccggtgagagactc

SEQ ID NO: 1100 - RNA, 18 nt, synthetic construct
  source 1..18: mol_type = other RNA
aggagaagtcgggaaggt

SEQ ID NO: 1101 - RNA, 22 nt, synthetic construct
  source 1..22: mol_type = other RNA
cctctgaaattcagttcttcag

SEQ ID NO: 1102 - RNA, 25 nt, synthetic construct
  source 1..25: mol_type = other RNA
taggcagtgtattgctagcggctgt

SEQ ID NO: 1103 - RNA, 23 nt, synthetic construct
  source 1..23: mol_type = other RNA
gggtttgtagctttgctggcatg

SEQ ID NO: 1104 - RNA, 21 nt, synthetic construct
  source 1..21: mol_type = other RNA
cacctctcctggcatcgcccc

SEQ ID NO: 1105 - RNA, 18 nt, synthetic construct
  source 1..18: mol_type = other RNA
aggaggaggaggtcaggc

SEQ ID NO: 1106 - RNA, 22 nt, synthetic construct
  source 1..22: mol_type = other RNA
agacatcaagatcagtcccaaa

SEQ ID NO: 1107 - RNA, 22 nt, synthetic construct
  source 1..22: mol_type = other RNA
actcgcatccttcccttggcag

SEQ ID NO: 1108 - RNA, 20 nt, synthetic construct
  source 1..20: mol_type = other RNA
tcgcgccccggctcccgttc

SEQ ID NO: 1109 - RNA, 22 nt, synthetic construct
  source 1..22: mol_type = other RNA
aggcctgtggctcctccctcag

SEQ ID NO: 1110 - RNA, 20 nt, synthetic construct
  source 1..20: mol_type = other RNA
aaaactgcagttacttttgc

SEQ ID NO: 1111 - RNA, 19 nt, synthetic construct
  source 1..19: mol_type = other RNA
ttattgtcacgttctgatt

SEQ ID NO: 1112 - RNA, 22 nt, synthetic construct
  source 1..22: mol_type = other RNA
ttgggatcattttgcatccata

SEQ ID NO: 1113 - RNA, 23 nt, synthetic construct
  source 1..23: mol_type = other RNA
cctgggcagcgtgtggctgaagg

SEQ ID NO: 1114 - RNA, 17 nt, synthetic construct
  source 1..17: mol_type = other RNA
ctccgggacggctgggc

SEQ ID NO: 1115 - RNA, 21 nt, synthetic construct
  source 1..21: mol_type = other RNA
cgtggaggacgaggaggaggc

SEQ ID NO: 1116 - RNA, 19 nt, synthetic construct
  source 1..19: mol_type = other RNA
tgcggcagagctggggtca

SEQ ID NO: 1117 - RNA, 21 nt, synthetic construct
  source 1..21: mol_type = other RNA
ccgtcgccgccacccgagccg

SEQ ID NO: 1118 - RNA, 22 nt, synthetic construct
  source 1..22: mol_type = other RNA
taaatagagtaggcaaaggaca

SEQ ID NO: 1119 - RNA, 22 nt, synthetic construct
  source 1..22: mol_type = other RNA
ctggactttgatcttgccataa

SEQ ID NO: 1120 - RNA, 22 nt, synthetic construct
  source 1..22: mol_type = other RNA
aactgtttgcagaggaaactga

SEQ ID NO: 1121 - RNA, 22 nt, synthetic construct
  source 1..22: mol_type = other RNA
tccttgacctgatgctgtaggg

SEQ ID NO: 1122 - RNA, 22 nt, synthetic construct
  source 1..22: mol_type = other RNA
gtccctctccaaatgtgtcttg

SEQ ID NO: 1123 - RNA, 21 nt, synthetic construct
  source 1..21: mol_type = other RNA
tcgtggcctggtctccattat

SEQ ID NO: 1124 - RNA, 22 nt, synthetic construct
  source 1..22: mol_type = other RNA
tctctcacctggcataagcaat

SEQ ID NO: 1125 - RNA, 22 nt, synthetic construct
  source 1..22: mol_type = other RNA
tggtctgtctctgccctggcac

SEQ ID NO: 1126 - RNA, 22 nt, synthetic construct
  source 1..22: mol_type = other RNA
aaagatctggaagtgggagaca

SEQ ID NO: 1127 - RNA, 22 nt, synthetic construct
  source 1..22: mol_type = other RNA
cgggtggatcacgatgcaattt

SEQ ID NO: 1128 - RNA, 22 nt, synthetic construct
  source 1..22: mol_type = other RNA
tacctgggagactgaggttgga

SEQ ID NO: 1129 - RNA, 22 nt, synthetic construct
  source 1..22: mol_type = other RNA
tgtgttagaataggggcaataa

SEQ ID NO: 1130 - RNA, 21 nt, synthetic construct
  source 1..21: mol_type = other RNA
gttcaaatccagatctataac

SEQ ID NO: 1131 - RNA, 22 nt, synthetic construct
  source 1..22: mol_type = other RNA
ctctagagggaagcactttctg

SEQ ID NO: 1132 - RNA, 22 nt, synthetic construct
  source 1..22: mol_type = other RNA
taggggaaaagtcctgatccgg

SEQ ID NO: 1133 - RNA, 22 nt, synthetic construct
  source 1..22: mol_type = other RNA
ttgagaatgatgaatcattagg

SEQ ID NO: 1134 - RNA, 21 nt, synthetic construct
  source 1..21: mol_type = other RNA
tctgaaagagcagttggtgtt

SEQ ID NO: 1135 - RNA, 22 nt, synthetic construct
  source 1..22: mol_type = other RNA
aagggggaaggaaacatggaga

SEQ ID NO: 1136 - RNA, 22 nt, synthetic construct
  source 1..22: mol_type = other RNA
tggggtaaggataggagggtca

SEQ ID NO: 1137 - RNA, 21 nt, synthetic construct
  source 1..21: mol_type = other RNA
aggcggagacttgggcaattg

SEQ ID NO: 1138 - RNA, 23 nt, synthetic construct
  source 1..23: mol_type = other RNA
ttattgcttaagaatacgcgtag

SEQ ID NO: 1139 - RNA, 17 nt, synthetic construct
  source 1..17: mol_type = other RNA
ggggcgcggccggatcg

SEQ ID NO: 1140 - RNA, 22 nt, synthetic construct
  source 1..22: mol_type = other RNA
caagaacctcagttgcttttgt

SEQ ID NO: 1141 - RNA, 20 nt, synthetic construct
  source 1..20: mol_type = other RNA
tcacgtctgcggctgtcacg

SEQ ID NO: 1142 - RNA, 20 nt, synthetic construct
  source 1..20: mol_type = other RNA
cggggtgggtgaggtcgggc

SEQ ID NO: 1143 - RNA, 22 nt, synthetic construct
  source 1..22: mol_type = other RNA
ttcggtatactttgtgaattgg

SEQ ID NO: 1144 - RNA, 22 nt, synthetic construct
  source 1..22: mol_type = other RNA
aaagttctgagacactccgact

SEQ ID NO: 1145 - RNA, 22 nt, synthetic construct
  source 1..22: mol_type = other RNA
aatgttggaatcctcgctagag

SEQ ID NO: 1146 - RNA, 22 nt, synthetic construct
  source 1..22: mol_type = other RNA
gagcttggatgagctgggctga

SEQ ID NO: 1147 - RNA, 22 nt, synthetic construct
  source 1..22: mol_type = other RNA
tccatgtttccttcccccttct

SEQ ID NO: 1148 - RNA, 22 nt, synthetic construct
  source 1..22: mol_type = other RNA
tgcaggggtcgggtgggccagg

SEQ ID NO: 1149 - RNA, 23 nt, synthetic construct
  source 1..23: mol_type = other RNA
acaaagtacagcattagccttag

SEQ ID NO: 1150 - RNA, 22 nt, synthetic construct
  source 1..22: mol_type = other RNA
cacccgtagaaccgaccttgcg

SEQ ID NO: 1151 - RNA, 21 nt, synthetic construct
  source 1..21: mol_type = other RNA
aaaagtaattgcggtttttgc

SEQ ID NO: 1152 - RNA, 22 nt, synthetic construct
  source 1..22: mol_type = other RNA
tgaaacatacacgggaaacctc

SEQ ID NO: 1153 - RNA, 22 nt, synthetic construct
  source 1..22: mol_type = other RNA
ctcatctgcaaagaagtaagtg

SEQ ID NO: 1154 - RNA, 22 nt, synthetic construct
  source 1..22: mol_type = other RNA
agttttgcaggtttgcatttca

SEQ ID NO: 1155 - RNA, 22 nt, synthetic construct
  source 1..22: mol_type = other RNA
acctggcatacaatgtagattt

SEQ ID NO: 1156 - RNA, 21 nt, synthetic construct
  source 1..21: mol_type = other RNA
ctgtgggctcagcgcgtgggg

SEQ ID NO: 1157 - RNA, 21 nt, synthetic construct
  source 1..21: mol_type = other RNA
ctcctctgttttctttcctag

SEQ ID NO: 1158 - RNA, 19 nt, synthetic construct
  source 1..19: mol_type = other RNA
cctgagaccctagttccac

SEQ ID NO: 1159 - RNA, 21 nt, synthetic construct
  source 1..21: mol_type = other RNA
caaaaccgcagtaacttttgt

SEQ ID NO: 1160 - RNA, 22 nt, synthetic construct
  source 1..22: mol_type = other RNA
tcagtcacatatctagtgtcta

SEQ ID NO: 1161 - RNA, 22 nt, synthetic construct
  source 1..22: mol_type = other RNA
tctcaggagtaaagacagagtt

SEQ ID NO: 1162 - RNA, 21 nt, synthetic construct
  source 1..21: mol_type = other RNA
gcgacccactcttggtttcca

SEQ ID NO: 1163 - RNA, 20 nt, synthetic construct
  source 1..20: mol_type = other RNA
tgtgggactgcaaatgggag

SEQ ID NO: 1164 - RNA, 22 nt, synthetic construct
  source 1..22: mol_type = other RNA
ctatacagtctactgtctttcc

SEQ ID NO: 1165 - RNA, 22 nt, synthetic construct
  source 1..22: mol_type = other RNA
tgcggggacaggccagggcatc

SEQ ID NO: 1166 - RNA, 22 nt, synthetic construct
  source 1..22: mol_type = other RNA
aaaactaggactgtgtggtgta

SEQ ID NO: 1167 - RNA, 22 nt, synthetic construct
  source 1..22: mol_type = other RNA
aggatttcagaaatactggtgt

SEQ ID NO: 1168 - RNA, 21 nt, synthetic construct
  source 1..21: mol_type = other RNA
cacccagatctgcggcctaat

SEQ ID NO: 1169 - RNA, 22 nt, synthetic construct
  source 1..22: mol_type = other RNA
agtggcacatgtttgttgtgag

SEQ ID NO: 1170 - RNA, 21 nt, synthetic construct
  source 1..21: mol_type = other RNA
atgacctatgaattgacagac

SEQ ID NO: 1171 - RNA, 25 nt, synthetic construct
  source 1..25: mol_type = other RNA
tgggaacgggttccggcagacgctg

SEQ ID NO: 1172 - RNA, 22 nt, synthetic construct
  source 1..22: mol_type = other RNA
tgaagttacatcatggtcgctt

SEQ ID NO: 1173 - RNA, 23 nt, synthetic construct
  source 1..23: mol_type = other RNA
taaatcccatggtgccttctcct

SEQ ID NO: 1174 - RNA, 25 nt, synthetic construct
  source 1..25: mol_type = other RNA
ttctgaggggacggtagatttgggg

SEQ ID NO: 1175 - RNA, 22 nt, synthetic construct
  source 1..22: mol_type = other RNA
tgaagctctgacattcctgcag

SEQ ID NO: 1176 - RNA, 22 nt, synthetic construct
  source 1..22: mol_type = other RNA
cctggcatatttggtataactt

SEQ ID NO: 1177 - RNA, 20 nt, synthetic construct
  source 1..20: mol_type = other RNA
aactctagcctgagcaacag

SEQ ID NO: 1178 - RNA, 20 nt, synthetic construct
  source 1..20: mol_type = other RNA
actcattctcctctgtccag

SEQ ID NO: 1179 - RNA, 22 nt, synthetic construct
  source 1..22: mol_type = other RNA
tctcccaacccttgtaccagtg

SEQ ID NO: 1180 - RNA, 23 nt, synthetic construct
  source 1..23: mol_type = other RNA
tcccccaggtgtgattctgattt

SEQ ID NO: 1181 - RNA, 22 nt, synthetic construct
  source 1..22: mol_type = other RNA
cagggctggcagtgacatgggt

SEQ ID NO: 1182 - RNA, 19 nt, synthetic construct
  source 1..19: mol_type = other RNA
tgagggaggaggttgggta

SEQ ID NO: 1183 - RNA, 18 nt, synthetic construct
  source 1..18: mol_type = other RNA
gggtcccggggagggggg

SEQ ID NO: 1184 - RNA, 22 nt, synthetic construct
  source 1..22: mol_type = other RNA
atgctgacatatttactagagg

SEQ ID NO: 1185 - RNA, 22 nt, synthetic construct
  source 1..22: mol_type = other RNA
caagcttgtatctataggtatg

SEQ ID NO: 1186 - RNA, 22 nt, synthetic construct
  source 1..22: mol_type = other RNA
taaagaactcttaaaacccaat

SEQ ID NO: 1187 - RNA, 22 nt, synthetic construct
  source 1..22: mol_type = other RNA
ctgggacaggaggaggaggcag

SEQ ID NO: 1188 - RNA, 22 nt, synthetic construct
  source 1..22: mol_type = other RNA
ttgtgggtgggcagaagtctgt

SEQ ID NO: 1189 - RNA, 20 nt, synthetic construct
  source 1..20: mol_type = other RNA
tccactctcctggcccccag

SEQ ID NO: 1190 - RNA, 22 nt, synthetic construct
  source 1..22: mol_type = other RNA
aggtggtccgtggcgcgttcgc

SEQ ID NO: 1191 - RNA, 22 nt, synthetic construct
  source 1..22: mol_type = other RNA
gctgactcctagtccagggctc

SEQ ID NO: 1192 - RNA, 20 nt, synthetic construct
  source 1..20: mol_type = other RNA
gtagaggagatggcgcaggg

SEQ ID NO: 1193 - RNA, 22 nt, synthetic construct
  source 1..22: mol_type = other RNA
tgaggcccttggggcacagtgg

SEQ ID NO: 1194 - RNA, 22 nt, synthetic construct
  source 1..22: mol_type = other RNA
agagcttagctgattggtgaac

SEQ ID NO: 1195 - RNA, 23 nt, synthetic construct
  source 1..23: mol_type = other RNA
cagtgcaatgatattgtcaaagc

SEQ ID NO: 1196 - RNA, 22 nt, synthetic construct
  source 1..22: mol_type = other RNA
tcaggacacttctgaacttgga

SEQ ID NO: 1197 - RNA, 22 nt, synthetic construct
  source 1..22: mol_type = other RNA
gtggaccaggatggcaagggct

SEQ ID NO: 1198 - RNA, 20 nt, synthetic construct
  source 1..20: mol_type = other RNA
cgtgccacccttttccccag

SEQ ID NO: 1199 - RNA, 22 nt, synthetic construct
  source 1..22: mol_type = other RNA
cttggttcagggagggtcccca

SEQ ID NO: 1200 - RNA, 22 nt, synthetic construct
  source 1..22: mol_type = other RNA
gggtggggatttgttgcattac

SEQ ID NO: 1201 - RNA, 22 nt, synthetic construct
  source 1..22: mol_type = other RNA
aggcattgacttctcactagct

SEQ ID NO: 1202 - RNA, 23 nt, synthetic construct
  source 1..23: mol_type = other RNA
caggggctggggtttcaggttct

SEQ ID NO: 1203 - RNA, 23 nt, synthetic construct
  source 1..23: mol_type = other RNA
tcaaatgctcagactcctgtggt

SEQ ID NO: 1204 - RNA, 22 nt, synthetic construct
  source 1..22: mol_type = other RNA
agccaggctctgaagggaaagt

SEQ ID NO: 1205 - RNA, 21 nt, synthetic construct
  source 1..21: mol_type = other RNA
atgatccaggaacctgcctct

SEQ ID NO: 1206 - RNA, 22 nt, synthetic construct
  source 1..22: mol_type = other RNA
acagtagtctgcacattggtta

SEQ ID NO: 1207 - RNA, 21 nt, synthetic construct
  source 1..21: mol_type = other RNA
ccccacctcctctctcctcag

SEQ ID NO: 1208 - RNA, 22 nt, synthetic construct
  source 1..22: mol_type = other RNA
gatgtactgaactgggtcagac

SEQ ID NO: 1209 - RNA, 22 nt, synthetic construct
  source 1..22: mol_type = other RNA
ctttcagtcagatgtttgctgc

SEQ ID NO: 1210 - RNA, 21 nt, synthetic construct
  source 1..21: mol_type = other RNA
tcgaccggacctcgaccggct

SEQ ID NO: 1211 - RNA, 22 nt, synthetic construct
  source 1..22: mol_type = other RNA
caatttagtgtgtgtgatattt

SEQ ID NO: 1212 - RNA, 17 nt, synthetic construct
  source 1..17: mol_type = other RNA
tgaggtagtagtttctt

SEQ ID NO: 1213 - RNA, 22 nt, synthetic construct
  source 1..22: mol_type = other RNA
gaaggcgcttccctttagagcg

SEQ ID NO: 1214 - RNA, 23 nt, synthetic construct
  source 1..23: mol_type = other RNA
aaggagcttacaatctagctggg

SEQ ID NO: 1215 - RNA, 18 nt, synthetic construct
  source 1..18: mol_type = other RNA
gtgttctctgatggacag

SEQ ID NO: 1216 - RNA, 21 nt, synthetic construct
  source 1..21: mol_type = other RNA
ttgaaaggctatttcttggtc

SEQ ID NO: 1217 - RNA, 18 nt, synthetic construct
  source 1..18: mol_type = other RNA
gggtgcgggccggcgggg

SEQ ID NO: 1218 - RNA, 22 nt, synthetic construct
  source 1..22: mol_type = other RNA
agcagaggcagagaggctcagg

SEQ ID NO: 1219 - RNA, 22 nt, synthetic construct
  source 1..22: mol_type = other RNA
tcccagggtctggtcagagttg

SEQ ID NO: 1220 - RNA, 22 nt, synthetic construct
  source 1..22: mol_type = other RNA
aaaagtaatcactgtttttgcc

SEQ ID NO: 1221 - RNA, 23 nt, synthetic construct
  source 1..23: mol_type = other RNA
tgaagctctaaggttccgcctgc

SEQ ID NO: 1222 - RNA, 22 nt, synthetic construct
  source 1..22: mol_type = other RNA
aaggaaccagaaaatgagaagt

SEQ ID NO: 1223 - RNA, 22 nt, synthetic construct
  source 1..22: mol_type = other RNA
tggcagtgtcttagctggttgt

SEQ ID NO: 1224 - RNA, 22 nt, synthetic construct
  source 1..22: mol_type = other RNA
gggacccagggagagacgtaag

SEQ ID NO: 1225 - RNA, 23 nt, synthetic construct
  source 1..23: mol_type = other RNA
tcaagagcaataacgaaaaatgt

SEQ ID NO: 1226 - RNA, 19 nt, synthetic construct
  source 1..19: mol_type = other RNA
aagtcccactaatgccagc

SEQ ID NO: 1227 - RNA, 21 nt, synthetic construct
  source 1..21: mol_type = other RNA
aggtgggtatggaggagccct

SEQ ID NO: 1228 - RNA, 22 nt, synthetic construct
  source 1..22: mol_type = other RNA
caagctcgtgtctgtgggtccg

SEQ ID NO: 1229 - RNA, 23 nt, synthetic construct
  source 1..23: mol_type = other RNA
acggagacgacaagactgtgctg

SEQ ID NO: 1230 - RNA, 19 nt, synthetic construct
  source 1..19: mol_type = other RNA
gtggtctcttggcccccag

SEQ ID NO: 1231 - RNA, 22 nt, synthetic construct
  source 1..22: mol_type = other RNA
ttcaagtaatccaggataggct

SEQ ID NO: 1232 - RNA, 24 nt, synthetic construct
  source 1..24: mol_type = other RNA
acatcctgctccacagggcagagg

SEQ ID NO: 1233 - RNA, 22 nt, synthetic construct
  source 1..22: mol_type = other RNA
ttggggtggagggccaaggagc

SEQ ID NO: 1234 - RNA, 21 nt, synthetic construct
  source 1..21: mol_type = other RNA
tcctgccttcctctgcaccag

SEQ ID NO: 1235 - RNA, 22 nt, synthetic construct
  source 1..22: mol_type = other RNA
tgatatgtttgatatattaggt

SEQ ID NO: 1236 - RNA, 21 nt, synthetic construct
  source 1..21: mol_type = other RNA
tctctgctctgctctccccag

SEQ ID NO: 1237 - RNA, 21 nt, synthetic construct
  source 1..21: mol_type = other RNA
ctggggggaggagaccctgct

SEQ ID NO: 1238 - RNA, 22 nt, synthetic construct
  source 1..22: mol_type = other RNA
attgtagaacctaagattggcc

SEQ ID NO: 1239 - RNA, 23 nt, synthetic construct
  source 1..23: mol_type = other RNA
gaagatggtgctgtgctgaggaa

SEQ ID NO: 1240 - RNA, 22 nt, synthetic construct
  source 1..22: mol_type = other RNA
aggtggatgcaatgtgacctca

SEQ ID NO: 1241 - RNA, 22 nt, synthetic construct
  source 1..22: mol_type = other RNA
caaaaatctcaattacttttgc

SEQ ID NO: 1242 - RNA, 18 nt, synthetic construct
  source 1..18: mol_type = other RNA
tccctggagtttcttctt

SEQ ID NO: 1243 - RNA, 22 nt, synthetic construct
  source 1..22: mol_type = other RNA
tgggagagcagggtattgtgga

SEQ ID NO: 1244 - RNA, 21 nt, synthetic construct
  source 1..21: mol_type = other RNA
gctgcaccggagactgggtaa

SEQ ID NO: 1245 - RNA, 21 nt, synthetic construct
  source 1..21: mol_type = other RNA
cagtgcaagtgtagatgccga

SEQ ID NO: 1246 - RNA, 23 nt, synthetic construct
  source 1..23: mol_type = other RNA
tttagtgtgataatggcgtttga

SEQ ID NO: 1247 - RNA, 22 nt, synthetic construct
  source 1..22: mol_type = other RNA
ttgctaagtaggctgagattga

SEQ ID NO: 1248 - RNA, 21 nt, synthetic construct
  source 1..21: mol_type = other RNA
atgtatgtgtgcatgtgcatg

SEQ ID NO: 1249 - RNA, 23 nt, synthetic construct
  source 1..23: mol_type = other RNA
caagtcttatttgagcacctgtt

SEQ ID NO: 1250 - RNA, 22 nt, synthetic construct
  source 1..22: mol_type = other RNA
gaatatgggtatattagtttgg

SEQ ID NO: 1251 - RNA, 23 nt, synthetic construct
  source 1..23: mol_type = other RNA
agaggctttgtgcggatacgggg

SEQ ID NO: 1252 - RNA, 22 nt, synthetic construct
  source 1..22: mol_type = other RNA
tgaggtagtaggttgtatagtt

SEQ ID NO: 1253 - RNA, 19 nt, synthetic construct
  source 1..19: mol_type = other RNA
tctagtgcgggcgttcccg

SEQ ID NO: 1254 - RNA, 24 nt, synthetic construct
  source 1..24: mol_type = other RNA
tggaagactagtgattttgttgtt

SEQ ID NO: 1255 - RNA, 23 nt, synthetic construct
  source 1..23: mol_type = other RNA
ctgactgaataggtagggtcatt

SEQ ID NO: 1256 - RNA, 22 nt, synthetic construct
  source 1..22: mol_type = other RNA
aacatcacagcaagtctgtgct

SEQ ID NO: 1257 - RNA, 22 nt, synthetic construct
  source 1..22: mol_type = other RNA
gttctcccaacgtaagcccagc

SEQ ID NO: 1258 - RNA, 21 nt, synthetic construct
  source 1..21: mol_type = other RNA
agcagacttgacctacaatta

SEQ ID NO: 1259 - RNA, 21 nt, synthetic construct
  source 1..21: mol_type = other RNA
caaagcgcttccctttggagc

SEQ ID NO: 1260 - RNA, 23 nt, synthetic construct
  source 1..23: mol_type = other RNA
taggtggcgccggaggagtcatt

SEQ ID NO: 1261 - RNA, 22 nt, synthetic construct
  source 1..22: mol_type = other RNA
ccgggagaaggaggtggcctgg

SEQ ID NO: 1262 - RNA, 23 nt, synthetic construct
  source 1..23: mol_type = other RNA
ttgctcctgactctgtgcccaca

SEQ ID NO: 1263 - RNA, 22 nt, synthetic construct
  source 1..22: mol_type = other RNA
ctgccctggcccgagggaccga

SEQ ID NO: 1264 - RNA, 22 nt, synthetic construct
  source 1..22: mol_type = other RNA
gctcttttcacattgtgctact

SEQ ID NO: 1265 - RNA, 21 nt, synthetic construct
  source 1..21: mol_type = other RNA
gcccctgggcctatcctagaa

SEQ ID NO: 1266 - RNA, 22 nt, synthetic construct
  source 1..22: mol_type = other RNA
tcgtgtcttgtgttgcagccgg

SEQ ID NO: 1267 - RNA, 22 nt, synthetic construct
  source 1..22: mol_type = other RNA
ctggggagatcctcgaggttgg

SEQ ID NO: 1268 - RNA, 21 nt, synthetic construct
  source 1..21: mol_type = other RNA
caggagtggggggtgggacgt

SEQ ID NO: 1269 - RNA, 20 nt, synthetic construct
  source 1..20: mol_type = other RNA
agagtcttgtgatgtcttgc

SEQ ID NO: 1270 - RNA, 23 nt, synthetic construct
  source 1..23: mol_type = other RNA
gaacgcgcttccctatagagggt

SEQ ID NO: 1271 - RNA, 23 nt, synthetic construct
  source 1..23: mol_type = other RNA
ttcatttggtataaaccgcgatt

SEQ ID NO: 1272 - RNA, 21 nt, synthetic construct
  source 1..21: mol_type = other RNA
tagataaaatattggtacctg

SEQ ID NO: 1273 - RNA, 22 nt, synthetic construct
  source 1..22: mol_type = other RNA
gaagttgttcgtggtggattcg

SEQ ID NO: 1274 - RNA, 18 nt, synthetic construct
  source 1..18: mol_type = other RNA
tgagatgacactgtagct

SEQ ID NO: 1275 - RNA, 20 nt, synthetic construct
  source 1..20: mol_type = other RNA
caggacttgacggctgcaac

SEQ ID NO: 1276 - RNA, 22 nt, synthetic construct
  source 1..22: mol_type = other RNA
atggttccgtcaagcaccatgg

SEQ ID NO: 1277 - RNA, 20 nt, synthetic construct
  source 1..20: mol_type = other RNA
atatgggtttactagttggt

SEQ ID NO: 1278 - RNA, 21 nt, synthetic construct
  source 1..21: mol_type = other RNA
cagcctctgcccttggcctcc

SEQ ID NO: 1279 - RNA, 23 nt, synthetic construct
  source 1..23: mol_type = other RNA
ccggtcccaggagaacctgcaga

SEQ ID NO: 1280 - RNA, 22 nt, synthetic construct
  source 1..22: mol_type = other RNA
ttttgtgtctcccattccccag

SEQ ID NO: 1281 - RNA, 22 nt, synthetic construct
  source 1..22: mol_type = other RNA
gtagattctccttctatgagta

SEQ ID NO: 1282 - RNA, 21 nt, synthetic construct
  source 1..21: mol_type = other RNA
catcccttgcatggtggaggg

SEQ ID NO: 1283 - RNA, 21 nt, synthetic construct
  source 1..21: mol_type = other RNA
tctggtgtatagcgttgctca

SEQ ID NO: 1284 - RNA, 22 nt, synthetic construct
  source 1..22: mol_type = other RNA
aaacaaacatggtgcacttctt

SEQ ID NO: 1285 - RNA, 20 nt, synthetic construct
  source 1..20: mol_type = other RNA
ctgggttgggctgggctggg

SEQ ID NO: 1286 - RNA, 17 nt, synthetic construct
  source 1..17: mol_type = other RNA
cagcctgacaggaacag

SEQ ID NO: 1287 - RNA, 17 nt, synthetic construct
  source 1..17: mol_type = other RNA
gggagaagggtcggggc

SEQ ID NO: 1288 - RNA, 22 nt, synthetic construct
  source 1..22: mol_type = other RNA
caagggaccaagcattcattat

SEQ ID NO: 1289 - RNA, 20 nt, synthetic construct
  source 1..20: mol_type = other RNA
gaggcagaagcaggatgaca

SEQ ID NO: 1290 - RNA, 22 nt, synthetic construct
  source 1..22: mol_type = other RNA
aacgggaatgcaggctgtatct

SEQ ID NO: 1291 - RNA, 23 nt, synthetic construct
  source 1..23: mol_type = other RNA
aggttctgtgatacactccgact

SEQ ID NO: 1292 - RNA, 22 nt, synthetic construct
  source 1..22: mol_type = other RNA
gaatgttgctcggtgaacccct

SEQ ID NO: 1293 - RNA, 22 nt, synthetic construct
  source 1..22: mol_type = other RNA
ttccctttgtcatcctatgcct

SEQ ID NO: 1294 - RNA, 22 nt, synthetic construct
  source 1..22: mol_type = other RNA
acgcccttcccccccttcttca

SEQ ID NO: 1295 - RNA, 24 nt, synthetic construct
  source 1..24: mol_type = other RNA
gatgcgccgcccactgccccgcgc

SEQ ID NO: 1296 - RNA, 19 nt, synthetic construct
  source 1..19: mol_type = other RNA
ttctgctgccggccaaggc

SEQ ID NO: 1297 - RNA, 22 nt, synthetic construct
  source 1..22: mol_type = other RNA
actgattatcttaactctctga

SEQ ID NO: 1298 - RNA, 21 nt, synthetic construct
  source 1..21: mol_type = other RNA
aaaaactgcaatcacttttgc

SEQ ID NO: 1299 - RNA, 22 nt, synthetic construct
  source 1..22: mol_type = other RNA
cagggcagggaaggtgggagag

SEQ ID NO: 1300 - RNA, 22 nt, synthetic construct
  source 1..22: mol_type = other RNA
tatggcactggtagaattcact

SEQ ID NO: 1301 - RNA, 21 nt, synthetic construct
  source 1..21: mol_type = other RNA
ctggcctcttctttctcctag

SEQ ID NO: 1302 - RNA, 22 nt, synthetic construct
  source 1..22: mol_type = other RNA
attctgcatttttagcaagttc

SEQ ID NO: 1303 - RNA, 22 nt, synthetic construct
  source 1..22: mol_type = other RNA
atgtagggctaaaagccatggg

SEQ ID NO: 1304 - RNA, 20 nt, synthetic construct
  source 1..20: mol_type = other RNA
tgtgaccctagaataattac

SEQ ID NO: 1305 - RNA, 22 nt, synthetic construct
  source 1..22: mol_type = other RNA
aaaggtaattgcagtttttccc

SEQ ID NO: 1306 - RNA, 22 nt, synthetic construct
  source 1..22: mol_type = other RNA
aatgcacccgggcaaggattct

SEQ ID NO: 1307 - RNA, 22 nt, synthetic construct
  source 1..22: mol_type = other RNA
caggaggcagtgggcgagcagg

SEQ ID NO: 1308 - RNA, 21 nt, synthetic construct
  source 1..21: mol_type = other RNA
cgctttgctcagccagtgtag

SEQ ID NO: 1309 - RNA, 22 nt, synthetic construct
  source 1..22: mol_type = other RNA
agaagtaactacggtttttgca

SEQ ID NO: 1310 - RNA, 22 nt, synthetic construct
  source 1..22: mol_type = other RNA
tcaggcagtgtgggtatcagat

SEQ ID NO: 1311 - RNA, 23 nt, synthetic construct
  source 1..23: mol_type = other RNA
tcatagccctgtacaatgctgct

SEQ ID NO: 1312 - RNA, 18 nt, synthetic construct
  source 1..18: mol_type = other RNA
agcaggtgcggggcggcg

SEQ ID NO: 1313 - RNA, 21 nt, synthetic construct
  source 1..21: mol_type = other RNA
gaaggcgcttccctttggagt

SEQ ID NO: 1314 - RNA, 22 nt, synthetic construct
  source 1..22: mol_type = other RNA
acagcaggcacagacaggcagt

SEQ ID NO: 1315 - RNA, 21 nt, synthetic construct
  source 1..21: mol_type = other RNA
taggacacatggtctacttct

SEQ ID NO: 1316 - RNA, 19 nt, synthetic construct
  source 1..19: mol_type = other RNA
gagggcgggtggaggagga

SEQ ID NO: 1317 - RNA, 23 nt, synthetic construct
  source 1..23: mol_type = other RNA
tgtctgcccgcatgcctgcctct

SEQ ID NO: 1318 - RNA, 22 nt, synthetic construct
  source 1..22: mol_type = other RNA
tagcttatcagactgatgttga

SEQ ID NO: 1319 - RNA, 21 nt, synthetic construct
  source 1..21: mol_type = other RNA
ctttgcttcctgctcccctag

SEQ ID NO: 1320 - RNA, 22 nt, synthetic construct
  source 1..22: mol_type = other RNA
ttcaccaccttctccacccagc

SEQ ID NO: 1321 - RNA, 22 nt, synthetic construct
  source 1..22: mol_type = other RNA
tctgaactctatgtgggattag

SEQ ID NO: 1322 - RNA, 22 nt, synthetic construct
  source 1..22: mol_type = other RNA
tgagaccaggactggatgcacc

SEQ ID NO: 1323 - RNA, 21 nt, synthetic construct
  source 1..21: mol_type = other RNA
gatttcagtggagtgaagttc

SEQ ID NO: 1324 - RNA, 22 nt, synthetic construct
  source 1..22: mol_type = other RNA
taaaactttaagtgtgcctagg

SEQ ID NO: 1325 - RNA, 16 nt, synthetic construct
  source 1..16: mol_type = other RNA
accgcctgcccagtga

SEQ ID NO: 1326 - RNA, 22 nt, synthetic construct
  source 1..22: mol_type = other RNA
ttctcaaggaggtgtcgtttat

SEQ ID NO: 1327 - RNA, 21 nt, synthetic construct
  source 1..21: mol_type = other RNA
caatgtgatcttttggatgta

SEQ ID NO: 1328 - RNA, 23 nt, synthetic construct
  source 1..23: mol_type = other RNA
gtccagttttcccaggaatccct

SEQ ID NO: 1329 - RNA, 22 nt, synthetic construct
  source 1..22: mol_type = other RNA
gcagtggctctgaaatgaactc

SEQ ID NO: 1330 - RNA, 22 nt, synthetic construct
  source 1..22: mol_type = other RNA
acccttgagcctgatccctagc

SEQ ID NO: 1331 - RNA, 22 nt, synthetic construct
  source 1..22: mol_type = other RNA
tacacaagaaaaccaaggctca

SEQ ID NO: 1332 - RNA, 23 nt, synthetic construct
  source 1..23: mol_type = other RNA
gacacgggcgacagctgcggccc

SEQ ID NO: 1333 - RNA, 22 nt, synthetic construct
  source 1..22: mol_type = other RNA
tgtagatacgagcaccagccac

SEQ ID NO: 1334 - RNA, 21 nt, synthetic construct
  source 1..21: mol_type = other RNA
atccccagatacaatggacaa

SEQ ID NO: 1335 - RNA, 19 nt, synthetic construct
  source 1..19: mol_type = other RNA
ggccactgagtcagcacca

SEQ ID NO: 1336 - RNA, 24 nt, synthetic construct
  source 1..24: mol_type = other RNA
tgtaggaacagttgaattttggct

SEQ ID NO: 1337 - RNA, 19 nt, synthetic construct
  source 1..19: mol_type = other RNA
tgcgcctcgggtgagcatg

SEQ ID NO: 1338 - RNA, 20 nt, synthetic construct
  source 1..20: mol_type = other RNA
ccaggagatccagagagaat

SEQ ID NO: 1339 - RNA, 21 nt, synthetic construct
  source 1..21: mol_type = other RNA
gtttaaccttttgcctgttgg

SEQ ID NO: 1340 - RNA, 22 nt, synthetic construct
  source 1..22: mol_type = other RNA
taggcacacttaaagttatagc

SEQ ID NO: 1341 - RNA, 20 nt, synthetic construct
  source 1..20: mol_type = other RNA
gggaaaaggaagggggagga

SEQ ID NO: 1342 - RNA, 20 nt, synthetic construct
  source 1..20: mol_type = other RNA
gagcttggtctgtagcggtt

SEQ ID NO: 1343 - RNA, 22 nt, synthetic construct
  source 1..22: mol_type = other RNA
ctgggaggtgtgatattgtggt

SEQ ID NO: 1344 - RNA, 20 nt, synthetic construct
  source 1..20: mol_type = other RNA
cgtgtgggaaggcgtggggt

SEQ ID NO: 1345 - RNA, 22 nt, synthetic construct
  source 1..22: mol_type = other RNA
atcatgatgggctcctcggtgt

SEQ ID NO: 1346 - RNA, 22 nt, synthetic construct
  source 1..22: mol_type = other RNA
ggctacaacacaggacccgggc

SEQ ID NO: 1347 - RNA, 20 nt, synthetic construct
  source 1..20: mol_type = other RNA
aggaatgttccttctttgcc

SEQ ID NO: 1348 - RNA, 22 nt, synthetic construct
  source 1..22: mol_type = other RNA
tgggtggtctggagatttgtgc

SEQ ID NO: 1349 - RNA, 22 nt, synthetic construct
  source 1..22: mol_type = other RNA
ccaaggaaggaggctggacatc

SEQ ID NO: 1350 - RNA, 22 nt, synthetic construct
  source 1..22: mol_type = other RNA
tgagcccctgtgccgcccccag

SEQ ID NO: 1351 - RNA, 20 nt, synthetic construct
  source 1..20: mol_type = other RNA
cgcccctcctgcccccacag

SEQ ID NO: 1352 - RNA, 22 nt, synthetic construct
  source 1..22: mol_type = other RNA
gacacatgaccataaatgctaa

SEQ ID NO: 1353 - RNA, 22 nt, synthetic construct
  source 1..22: mol_type = other RNA
ctgtgcgtgtgacagcggctga

SEQ ID NO: 1354 - RNA, 23 nt, synthetic construct
  source 1..23: mol_type = other RNA
taagtgcttccatgtttgagtgt

SEQ ID NO: 1355 - RNA, 20 nt, synthetic construct
  source 1..20: mol_type = other RNA
cccggccggaacgccgcact

SEQ ID NO: 1356 - RNA, 23 nt, synthetic construct
  source 1..23: mol_type = other RNA
cggggccatggagcagcctgtgt

SEQ ID NO: 1357 - RNA, 21 nt, synthetic construct
  source 1..21: mol_type = other RNA
tgcacggcactggggacacgt

SEQ ID NO: 1358 - RNA, 22 nt, synthetic construct
  source 1..22: mol_type = other RNA
cagccctcctcccgcacccaaa

SEQ ID NO: 1359 - RNA, 23 nt, synthetic construct
  source 1..23: mol_type = other RNA
caggcagtgactgttcagacgtc

SEQ ID NO: 1360 - RNA, 22 nt, synthetic construct
  source 1..22: mol_type = other RNA
aagtgcttccttttagagggtt

SEQ ID NO: 1361 - RNA, 21 nt, synthetic construct
  source 1..21: mol_type = other RNA
aggttgcctgtgaggtgttca

SEQ ID NO: 1362 - RNA, 23 nt, synthetic construct
  source 1..23: mol_type = other RNA
aagaagagactgagtcatcgaat

SEQ ID NO: 1363 - RNA, 22 nt, synthetic construct
  source 1..22: mol_type = other RNA
aatcatacagggacatccagtt

SEQ ID NO: 1364 - RNA, 22 nt, synthetic construct
  source 1..22: mol_type = other RNA
tgtaaacatccccgactggaag

SEQ ID NO: 1365 - RNA, 18 nt, synthetic construct
  source 1..18: mol_type = other RNA
aaaagtacttgcggattt

SEQ ID NO: 1366 - RNA, 21 nt, synthetic construct
  source 1..21: mol_type = other RNA
accgtctcttctgttccccag

SEQ ID NO: 1367 - RNA, 22 nt, synthetic construct
  source 1..22: mol_type = other RNA
ctctagagggaagcactttctg

SEQ ID NO: 1368 - RNA, 22 nt, synthetic construct
  source 1..22: mol_type = other RNA
aggactgatcctctcgggcagg

SEQ ID NO: 1369 - RNA, 24 nt, synthetic construct
  source 1..24: mol_type = other RNA
actgggggctttcgggctctgcgt

SEQ ID NO: 1370 - RNA, 21 nt, synthetic construct
  source 1..21: mol_type = other RNA
gtgtggccggcaggcgggtgg

SEQ ID NO: 1371 - RNA, 23 nt, synthetic construct
  source 1..23: mol_type = other RNA
tggggggacagatggagaggaca

SEQ ID NO: 1372 - RNA, 23 nt, synthetic construct
  source 1..23: mol_type = other RNA
acctggacccagcgtagacaaag

SEQ ID NO: 1373 - RNA, 23 nt, synthetic construct
  source 1..23: mol_type = other RNA
taggcagtgtcattagctgattg

SEQ ID NO: 1374 - RNA, 23 nt, synthetic construct
  source 1..23: mol_type = other RNA
tgacgccccttctgattctgcct

SEQ ID NO: 1375 - RNA, 22 nt, synthetic construct
  source 1..22: mol_type = other RNA
gaaagcgcttccctttgctgga

SEQ ID NO: 1376 - RNA, 22 nt, synthetic construct
  source 1..22: mol_type = other RNA
tgaggctaatgcactacttcac

SEQ ID NO: 1377 - RNA, 19 nt, synthetic construct
  source 1..19: mol_type = other RNA
tctaggctggtactgctga

SEQ ID NO: 1378 - RNA, 20 nt, synthetic construct
  source 1..20: mol_type = other RNA
gagacaggttcatgctgcta

SEQ ID NO: 1379 - RNA, 23 nt, synthetic construct
  source 1..23: mol_type = other RNA
caaagtgcttacagtgcaggtag

SEQ ID NO: 1380 - RNA, 22 nt, synthetic construct
  source 1..22: mol_type = other RNA
tgtctctcgcccttggccttag

SEQ ID NO: 1381 - RNA, 22 nt, synthetic construct
  source 1..22: mol_type = other RNA
cagagggaatacagagggcaat

SEQ ID NO: 1382 - RNA, 21 nt, synthetic construct
  source 1..21: mol_type = other RNA
ctgggctcgggacgcgcggct

SEQ ID NO: 1383 - RNA, 22 nt, synthetic construct
  source 1..22: mol_type = other RNA
aatctgagaaggcgcacaaggt

SEQ ID NO: 1384 - RNA, 21 nt, synthetic construct
  source 1..21: mol_type = other RNA
gttagggccaacatctcttgg

SEQ ID NO: 1385 - RNA, 23 nt, synthetic construct
  source 1..23: mol_type = other RNA
ctggcggagcccattccatgcca

SEQ ID NO: 1386 - RNA, 22 nt, synthetic construct
  source 1..22: mol_type = other RNA
tagtggatgatgcactctgtgc

SEQ ID NO: 1387 - RNA, 22 nt, synthetic construct
  source 1..22: mol_type = other RNA
caggaaggagacaggcagttca

SEQ ID NO: 1388 - RNA, 23 nt, synthetic construct
  source 1..23: mol_type = other RNA
taagtgcttccatgttttagtag

SEQ ID NO: 1389 - RNA, 22 nt, synthetic construct
  source 1..22: mol_type = other RNA
tattgcactcgtcccggcctcc

SEQ ID NO: 1390 - RNA, 21 nt, synthetic construct
  source 1..21: mol_type = other RNA
acctgaattaccaaaagcttt

SEQ ID NO: 1391 - RNA, 22 nt, synthetic construct
  source 1..22: mol_type = other RNA
gactcactcacaggattgtgca

SEQ ID NO: 1392 - RNA, 23 nt, synthetic construct
  source 1..23: mol_type = other RNA
ggatggttgggggcggtcggcgt

SEQ ID NO: 1393 - RNA, 22 nt, synthetic construct
  source 1..22: mol_type = other RNA
gaaagcgcttccttttagagga

SEQ ID NO: 1394 - RNA, 22 nt, synthetic construct
  source 1..22: mol_type = other RNA
tcgtatcagagattccagacac

SEQ ID NO: 1395 - RNA, 20 nt, synthetic construct
  source 1..20: mol_type = other RNA
ttggccatggggctgcgcgg

SEQ ID NO: 1396 - RNA, 22 nt, synthetic construct
  source 1..22: mol_type = other RNA
gatggttgaccagagagcacac

SEQ ID NO: 1397 - RNA, 23 nt, synthetic construct
  source 1..23: mol_type = other RNA
atgctactcggaaatcccactga

SEQ ID NO: 1398 - RNA, 23 nt, synthetic construct
  source 1..23: mol_type = other RNA
gtgcttcatcgtaattaacctta

SEQ ID NO: 1399 - RNA, 22 nt, synthetic construct
  source 1..22: mol_type = other RNA
gtagcaccttgcaggataaggt

SEQ ID NO: 1400 - RNA, 22 nt, synthetic construct
  source 1..22: mol_type = other RNA
tgatctcaccgctgcctccttc

SEQ ID NO: 1401 - RNA, 22 nt, synthetic construct
  source 1..22: mol_type = other RNA
agaggttgcccttggtgaattc

SEQ ID NO: 1402 - RNA, 20 nt, synthetic construct
  source 1..20: mol_type = other RNA
aaagtagctgtaccatttgc

SEQ ID NO: 1403 - RNA, 17 nt, synthetic construct
  source 1..17: mol_type = other RNA
ccagttttcccaggatt

SEQ ID NO: 1404 - RNA, 20 nt, synthetic construct
  source 1..20: mol_type = other RNA
agaggtatagggcatgggaa

SEQ ID NO: 1405 - RNA, 21 nt, synthetic construct
  source 1..21: mol_type = other RNA
tcatcctcgtctccctcccag

SEQ ID NO: 1406 - RNA, 18 nt, synthetic construct
  source 1..18: mol_type = other RNA
ctctgggaaatgggacag

SEQ ID NO: 1407 - RNA, 22 nt, synthetic construct
  source 1..22: mol_type = other RNA
acacagtgcttcatccactact

SEQ ID NO: 1408 - RNA, 21 nt, synthetic construct
  source 1..21: mol_type = other RNA
cgagcctcaagcaagggactt

SEQ ID NO: 1409 - RNA, 22 nt, synthetic construct
  source 1..22: mol_type = other RNA
caaataataccacagtgggtgt

SEQ ID NO: 1410 - RNA, 22 nt, synthetic construct
  source 1..22: mol_type = other RNA
gggggtccccggtgctcggatc

SEQ ID NO: 1411 - RNA, 21 nt, synthetic construct
  source 1..21: mol_type = other RNA
ctcgtgggctctggccacggc

SEQ ID NO: 1412 - RNA, 22 nt, synthetic construct
  source 1..22: mol_type = other RNA
gctacttcacaacaccagggcc

SEQ ID NO: 1413 - RNA, 24 nt, synthetic construct
  source 1..24: mol_type = other RNA
tgcccatgccatacttttgcctca

SEQ ID NO: 1414 - RNA, 22 nt, synthetic construct
  source 1..22: mol_type = other RNA
caggtcacgtctctgcagttac

SEQ ID NO: 1415 - RNA, 23 nt, synthetic construct
  source 1..23: mol_type = other RNA
tgtagagcagggagcaggaagct

SEQ ID NO: 1416 - RNA, 21 nt, synthetic construct
  source 1..21: mol_type = other RNA
acactgtccccttctccccag

SEQ ID NO: 1417 - RNA, 18 nt, synthetic construct
  source 1..18: mol_type = other RNA
tgcttcctttctcagctg

SEQ ID NO: 1418 - RNA, 24 nt, synthetic construct
  source 1..24: mol_type = other RNA
ccatgaagcagtgggtaggaggac

SEQ ID NO: 1419 - RNA, 21 nt, synthetic construct
  source 1..21: mol_type = other RNA
cgggggcggggccgaagcgcg

SEQ ID NO: 1420 - RNA, 22 nt, synthetic construct
  source 1..22: mol_type = other RNA
acctgtctgtggaaaggagcta

SEQ ID NO: 1421 - RNA, 17 nt, synthetic construct
  source 1..17: mol_type = other RNA
cgcgccgggcccgggtt

SEQ ID NO: 1422 - RNA, 22 nt, synthetic construct
  source 1..22: mol_type = other RNA
tgggtctttgcgggcgagatga

SEQ ID NO: 1423 - RNA, 17 nt, synthetic construct
  source 1..17: mol_type = other RNA
gctgggcgaggctggca

SEQ ID NO: 1424 - RNA, 17 nt, synthetic construct
  source 1..17: mol_type = other RNA
ggatggaggaggggtct

SEQ ID NO: 1425 - RNA, 22 nt, synthetic construct
  source 1..22: mol_type = other RNA
gagagcagtgtgtgttgcctgg

SEQ ID NO: 1426 - RNA, 21 nt, synthetic construct
  source 1..21: mol_type = other RNA
tattcagaaaggtgccagtca

SEQ ID NO: 1427 - RNA, 21 nt, synthetic construct
  source 1..21: mol_type = other RNA
aagcattctttcattggttgg

SEQ ID NO: 1428 - RNA, 20 nt, synthetic construct
  source 1..20: mol_type = other RNA
tatgtcccatccctccatca

SEQ ID NO: 1429 - RNA, 22 nt, synthetic construct
  source 1..22: mol_type = other RNA
tggttgaccatagaacatgcgc

SEQ ID NO: 1430 - RNA, 23 nt, synthetic construct
  source 1..23: mol_type = other RNA
agttttgcaggtttgcatccagc

SEQ ID NO: 1431 - RNA, 22 nt, synthetic construct
  source 1..22: mol_type = other RNA
tgacctttgcctctcccctcag

SEQ ID NO: 1432 - RNA, 23 nt, synthetic construct
  source 1..23: mol_type = other RNA
taatccttgctacctgggtgaga

SEQ ID NO: 1433 - RNA, 22 nt, synthetic construct
  source 1..22: mol_type = other RNA
tgcggggctagggctaacagca

SEQ ID NO: 1434 - RNA, 22 nt, synthetic construct
  source 1..22: mol_type = other RNA
cctattcttgattacttgtttc

SEQ ID NO: 1435 - RNA, 23 nt, synthetic construct
  source 1..23: mol_type = other RNA
cctccgtgttacctgtcctctag

SEQ ID NO: 1436 - RNA, 22 nt, synthetic construct
  source 1..22: mol_type = other RNA
tctgtgagaccaaagaactact

SEQ ID NO: 1437 - RNA, 22 nt, synthetic construct
  source 1..22: mol_type = other RNA
caatcagcaagtatactgccct

SEQ ID NO: 1438 - RNA, 22 nt, synthetic construct
  source 1..22: mol_type = other RNA
gttgggacaagaggacggtctt

SEQ ID NO: 1439 - RNA, 22 nt, synthetic construct
  source 1..22: mol_type = other RNA
tttgtgacctggtccactaacc

SEQ ID NO: 1440 - RNA, 18 nt, synthetic construct
  source 1..18: mol_type = other RNA
cagcagtccctccccctg

SEQ ID NO: 1441 - RNA, 20 nt, synthetic construct
  source 1..20: mol_type = other RNA
tagggggtggcaggctggcc

SEQ ID NO: 1442 - RNA, 23 nt, synthetic construct
  source 1..23: mol_type = other RNA
gcggtgatcccgatggtgtgagc

SEQ ID NO: 1443 - RNA, 22 nt, synthetic construct
  source 1..22: mol_type = other RNA
ctcaagtagtctgaccagggga

SEQ ID NO: 1444 - RNA, 21 nt, synthetic construct
  source 1..21: mol_type = other RNA
taaaactgcagttatttttgc

SEQ ID NO: 1445 - RNA, 21 nt, synthetic construct
  source 1..21: mol_type = other RNA
gcagcccagctgaggcctctg

SEQ ID NO: 1446 - RNA, 22 nt, synthetic construct
  source 1..22: mol_type = other RNA
ttcctatgcatatacttctttg

SEQ ID NO: 1447 - RNA, 20 nt, synthetic construct
  source 1..20: mol_type = other RNA
actggacttggagtcagaaa

SEQ ID NO: 1448 - RNA, 25 nt, synthetic construct
  source 1..25: mol_type = other RNA
gtgaggcggggccaggagggtgtgt

SEQ ID NO: 1449 - RNA, 23 nt, synthetic construct
  source 1..23: mol_type = other RNA
caggcagaagtggggctgacagg

SEQ ID NO: 1450 - RNA, 21 nt, synthetic construct
  source 1..21: mol_type = other RNA
cctgttgaagtgtaatcccca

SEQ ID NO: 1451 - RNA, 23 nt, synthetic construct
  source 1..23: mol_type = other RNA
agggaaaaaaaaaaggatttgtc

SEQ ID NO: 1452 - RNA, 22 nt, synthetic construct
  source 1..22: mol_type = other RNA
cctgacaccccatctgccctca

SEQ ID NO: 1453 - RNA, 22 nt, synthetic construct
  source 1..22: mol_type = other RNA
accgaagactgtgcgctaatct

SEQ ID NO: 1454 - RNA, 20 nt, synthetic construct
  source 1..20: mol_type = other RNA
ggggagctgtggaagcagta

SEQ ID NO: 1455 - RNA, 23 nt, synthetic construct
  source 1..23: mol_type = other RNA
tcaataggaaagaggtgggacct

SEQ ID NO: 1456 - RNA, 22 nt, synthetic construct
  source 1..22: mol_type = other RNA
aatccacgctgagcttggcatc

SEQ ID NO: 1457 - RNA, 22 nt, synthetic construct
  source 1..22: mol_type = other RNA
aaaagtaattgtggttttggcc

SEQ ID NO: 1458 - RNA, 22 nt, synthetic construct
  source 1..22: mol_type = other RNA
tatagggattggagccgtggcg

SEQ ID NO: 1459 - RNA, 18 nt, synthetic construct
  source 1..18: mol_type = other RNA
tgcttcctttcagagggt

SEQ ID NO: 1460 - RNA, 22 nt, synthetic construct
  source 1..22: mol_type = other RNA
agactgacggctggaggcccat

SEQ ID NO: 1461 - RNA, 22 nt, synthetic construct
  source 1..22: mol_type = other RNA
ctctagagggaagcgctttctg

SEQ ID NO: 1462 - RNA, 22 nt, synthetic construct
  source 1..22: mol_type = other RNA
tccttcattccaccggagtctg

SEQ ID NO: 1463 - RNA, 19 nt, synthetic construct
  source 1..19: mol_type = other RNA
tgtctctgctggggtttct

SEQ ID NO: 1464 - RNA, 22 nt, synthetic construct
  source 1..22: mol_type = other RNA
cgcagggccctggcgcaggcat

SEQ ID NO: 1465 - RNA, 21 nt, synthetic construct
  source 1..21: mol_type = other RNA
ttggagggtgtggaagacatc

SEQ ID NO: 1466 - RNA, 21 nt, synthetic construct
  source 1..21: mol_type = other RNA
gtgttgaaacaatctctactg

SEQ ID NO: 1467 - RNA, 23 nt, synthetic construct
  source 1..23: mol_type = other RNA
aggtctgcattcaaatccccaga

SEQ ID NO: 1468 - RNA, 21 nt, synthetic construct
  source 1..21: mol_type = other RNA
tctggctgtgctgtaatgcag

SEQ ID NO: 1469 - RNA, 22 nt, synthetic construct
  source 1..22: mol_type = other RNA
gtgagtctctaagaaaagagga

SEQ ID NO: 1470 - RNA, 22 nt, synthetic construct
  source 1..22: mol_type = other RNA
tgtctacattaatgaaaagagc

SEQ ID NO: 1471 - RNA, 21 nt, synthetic construct
  source 1..21: mol_type = other RNA
agagattggtagaaatcaggt

SEQ ID NO: 1472 - RNA, 23 nt, synthetic construct
  source 1..23: mol_type = other RNA
taaatttcacctttctgagaagg

SEQ ID NO: 1473 - RNA, 24 nt, synthetic construct
  source 1..24: mol_type = other RNA
ccggccccgcctcggctccgcacc

SEQ ID NO: 1474 - RNA, 22 nt, synthetic construct
  source 1..22: mol_type = other RNA
agcccctgcccaccgcacactg

SEQ ID NO: 1475 - RNA, 22 nt, synthetic construct
  source 1..22: mol_type = other RNA
agggaaggggacgagggttggg

SEQ ID NO: 1476 - RNA, 22 nt, synthetic construct
  source 1..22: mol_type = other RNA
agcaaggcggcatctctctgat

SEQ ID NO: 1477 - RNA, 19 nt, synthetic construct
  source 1..19: mol_type = other RNA
ccgcctgagctagctgtgg

SEQ ID NO: 1478 - RNA, 22 nt, synthetic construct
  source 1..22: mol_type = other RNA
tgccctgcctgttttctccttt

SEQ ID NO: 1479 - RNA, 21 nt, synthetic construct
  source 1..21: mol_type = other RNA
gaggtttggggaggatttgct

SEQ ID NO: 1480 - RNA, 18 nt, synthetic construct
  source 1..18: mol_type = other RNA
ccagtgtggctcagcgag

SEQ ID NO: 1481 - RNA, 21 nt, synthetic construct
  source 1..21: mol_type = other RNA
aaaggtgctcaaattagacat

SEQ ID NO: 1482 - RNA, 22 nt, synthetic construct
  source 1..22: mol_type = other RNA
tgtcagtttgtcaaatacccca

SEQ ID NO: 1483 - RNA, 21 nt, synthetic construct
  source 1..21: mol_type = other RNA
cataaagtagaaagcactact

SEQ ID NO: 1484 - RNA, 22 nt, synthetic construct
  source 1..22: mol_type = other RNA
tccctcgccttctcaccctcag

SEQ ID NO: 1485 - RNA, 22 nt, synthetic construct
  source 1..22: mol_type = other RNA
cctcaccatcccttctgcctgc

SEQ ID NO: 1486 - RNA, 22 nt, synthetic construct
  source 1..22: mol_type = other RNA
aaactaatatacccatattctg

SEQ ID NO: 1487 - RNA, 21 nt, synthetic construct
  source 1..21: mol_type = other RNA
ttttgcaccttttggagtgaa

SEQ ID NO: 1488 - RNA, 24 nt, synthetic construct
  source 1..24: mol_type = other RNA
agatgtatggaatctgtatatatc

SEQ ID NO: 1489 - RNA, 22 nt, synthetic construct
  source 1..22: mol_type = other RNA
gagcaatgtaggtagactgttt

SEQ ID NO: 1490 - RNA, 21 nt, synthetic construct
  source 1..21: mol_type = other RNA
acaaggtgtgcatgcctgacc

SEQ ID NO: 1491 - RNA, 24 nt, synthetic construct
  source 1..24: mol_type = other RNA
tggcgattttggaactcaatggca

SEQ ID NO: 1492 - RNA, 22 nt, synthetic construct
  source 1..22: mol_type = other RNA
gcccaaaggtgaattttttggg

SEQ ID NO: 1493 - RNA, 22 nt, synthetic construct
  source 1..22: mol_type = other RNA
gggaggtgtgatctcacactcg

SEQ ID NO: 1494 - RNA, 21 nt, synthetic construct
  source 1..21: mol_type = other RNA
ccctctctgtcccacccatag

SEQ ID NO: 1495 - RNA, 24 nt, synthetic construct
  source 1..24: mol_type = other RNA
tagtggagctgggaggcagctcgg

SEQ ID NO: 1496 - RNA, 23 nt, synthetic construct
  source 1..23: mol_type = other RNA
agctccctgaatccctgtcccag

SEQ ID NO: 1497 - RNA, 22 nt, synthetic construct
  source 1..22: mol_type = other RNA
caaattcgtatctaggggaata

SEQ ID NO: 1498 - RNA, 21 nt, synthetic construct
  source 1..21: mol_type = other RNA
tggcttctcttgcacacccag

SEQ ID NO: 1499 - RNA, 20 nt, synthetic construct
  source 1..20: mol_type = other RNA
agagatgaagcgggggggcg

SEQ ID NO: 1500 - RNA, 22 nt, synthetic construct
  source 1..22: mol_type = other RNA
tggaatgtaaagaagtatgtat

SEQ ID NO: 1501 - RNA, 22 nt, synthetic construct
  source 1..22: mol_type = other RNA
catcttaccggacagtgctgga

SEQ ID NO: 1502 - RNA, 22 nt, synthetic construct
  source 1..22: mol_type = other RNA
tggaagggagaagagctttaat

SEQ ID NO: 1503 - RNA, 21 nt, synthetic construct
  source 1..21: mol_type = other RNA
ctgactgttgccgtcctccag

SEQ ID NO: 1504 - RNA, 22 nt, synthetic construct
  source 1..22: mol_type = other RNA
gtgtggaagatgggaggagaaa

SEQ ID NO: 1505 - RNA, 22 nt, synthetic construct
  source 1..22: mol_type = other RNA
agggagggtgtggtatggatgt

SEQ ID NO: 1506 - RNA, 20 nt, synthetic construct
  source 1..20: mol_type = other RNA
ccactgcctatgccccacag

SEQ ID NO: 1507 - RNA, 23 nt, synthetic construct
  source 1..23: mol_type = other RNA
tttgtatggatatgtgtgtgtat

SEQ ID NO: 1508 - RNA, 22 nt, synthetic construct
  source 1..22: mol_type = other RNA
ctatacaacctactgccttccc

SEQ ID NO: 1509 - RNA, 23 nt, synthetic construct
  source 1..23: mol_type = other RNA
agggagaaagctagaagctgaag

SEQ ID NO: 1510 - RNA, 22 nt, synthetic construct
  source 1..22: mol_type = other RNA
gccctgtggactcagttctggt

SEQ ID NO: 1511 - RNA, 21 nt, synthetic construct
  source 1..21: mol_type = other RNA
ctctcggacaagctgtaggtc

SEQ ID NO: 1512 - RNA, 22 nt, synthetic construct
  source 1..22: mol_type = other RNA
tgctgggggccacatgagtgtg

SEQ ID NO: 1513 - RNA, 21 nt, synthetic construct
  source 1..21: mol_type = other RNA
ctgtacaggccactgccttgc

SEQ ID NO: 1514 - RNA, 21 nt, synthetic construct
  source 1..21: mol_type = other RNA
ttgccatacatagactttatt

SEQ ID NO: 1515 - RNA, 22 nt, synthetic construct
  source 1..22: mol_type = other RNA
gaaatcaagcgtgggtgagacc

SEQ ID NO: 1516 - RNA, 21 nt, synthetic construct
  source 1..21: mol_type = other RNA
tcacgcggagagatggctttg

SEQ ID NO: 1517 - RNA, 23 nt, synthetic construct
  source 1..23: mol_type = other RNA
acttaaacgtggatgtacttgct

SEQ ID NO: 1518 - RNA, 22 nt, synthetic construct
  source 1..22: mol_type = other RNA
tgagacctctgggttctgagct

SEQ ID NO: 1519 - RNA, 23 nt, synthetic construct
  source 1..23: mol_type = other RNA
tgtgcaaatctatgcaaaactga

SEQ ID NO: 1520 - RNA, 22 nt, synthetic construct
  source 1..22: mol_type = other RNA
agcgaggttgccctttgtatat

SEQ ID NO: 1521 - RNA, 22 nt, synthetic construct
  source 1..22: mol_type = other RNA
tcggctctctccctcaccctag

SEQ ID NO: 1522 - RNA, 19 nt, synthetic construct
  source 1..19: mol_type = other RNA
cggggccagagcagagagc

SEQ ID NO: 1523 - RNA, 19 nt, synthetic construct
  source 1..19: mol_type = other RNA
tctggggtcttgggccatc

SEQ ID NO: 1524 - RNA, 22 nt, synthetic construct
  source 1..22: mol_type = other RNA
acctgaggttgtgcatttctaa

SEQ ID NO: 1525 - RNA, 18 nt, synthetic construct
  source 1..18: mol_type = other RNA
aggctgggctgggacgga

SEQ ID NO: 1526 - RNA, 22 nt, synthetic construct
  source 1..22: mol_type = other RNA
acctggcagcagggagcgtcgt

SEQ ID NO: 1527 - RNA, 22 nt, synthetic construct
  source 1..22: mol_type = other RNA
aggagctagccaggcatatgca

SEQ ID NO: 1528 - RNA, 22 nt, synthetic construct
  source 1..22: mol_type = other RNA
aggtgttatcctatccatttgc

SEQ ID NO: 1529 - RNA, 22 nt, synthetic construct
  source 1..22: mol_type = other RNA
cagtggccagagccctgcagtg

SEQ ID NO: 1530 - RNA, 22 nt, synthetic construct
  source 1..22: mol_type = other RNA
aatgtggactggtgtgaccaaa

SEQ ID NO: 1531 - RNA, 23 nt, synthetic construct
  source 1..23: mol_type = other RNA
ctaccctcggtctgcttaccaca

SEQ ID NO: 1532 - RNA, 23 nt, synthetic construct
  source 1..23: mol_type = other RNA
tgtcactcggctcggcccactac

SEQ ID NO: 1533 - RNA, 22 nt, synthetic construct
  source 1..22: mol_type = other RNA
tgcccttaaaggtgaacccagt

SEQ ID NO: 1534 - RNA, 22 nt, synthetic construct
  source 1..22: mol_type = other RNA
gatatcagctcagtaggcaccg

SEQ ID NO: 1535 - RNA, 22 nt, synthetic construct
  source 1..22: mol_type = other RNA
tccgaactctccattcctctgc

SEQ ID NO: 1536 - RNA, 23 nt, synthetic construct
  source 1..23: mol_type = other RNA
tctcacacagaaatcgcacccgt

SEQ ID NO: 1537 - RNA, 18 nt, synthetic construct
  source 1..18: mol_type = other RNA
atggtcacctccgggact

SEQ ID NO: 1538 - RNA, 22 nt, synthetic construct
  source 1..22: mol_type = other RNA
ttatggtttgcctgggactgag

SEQ ID NO: 1539 - RNA, 24 nt, synthetic construct
  source 1..24: mol_type = other RNA
agcagaagcagggaggttctccca

SEQ ID NO: 1540 - RNA, 23 nt, synthetic construct
  source 1..23: mol_type = other RNA
ctttgagcacatgagcagacgga

SEQ ID NO: 1541 - RNA, 22 nt, synthetic construct
  source 1..22: mol_type = other RNA
aggaggcatcttgagaaatgga

SEQ ID NO: 1542 - RNA, 23 nt, synthetic construct
  source 1..23: mol_type = other RNA
tcggggatcatcatgtcacgaga

SEQ ID NO: 1543 - RNA, 23 nt, synthetic construct
  source 1..23: mol_type = other RNA
tgtgcaaatccatgcaaaactga

SEQ ID NO: 1544 - RNA, 20 nt, synthetic construct
  source 1..20: mol_type = other RNA
gtgtctgggcggacagctgc

SEQ ID NO: 1545 - RNA, 17 nt, synthetic construct
  source 1..17: mol_type = other RNA
cagtgttcagagatgga

SEQ ID NO: 1546 - RNA, 21 nt, synthetic construct
  source 1..21: mol_type = other RNA
ggccccgggccctcgaccggg

SEQ ID NO: 1547 - RNA, 23 nt, synthetic construct
  source 1..23: mol_type = other RNA
tggtgcggagagggcccacagtg

SEQ ID NO: 1548 - RNA, 23 nt, synthetic construct
  source 1..23: mol_type = other RNA
cccagtgttcagactacctgttc

SEQ ID NO: 1549 - RNA, 22 nt, synthetic construct
  source 1..22: mol_type = other RNA
ttcacaaggaggtgtcatttat

SEQ ID NO: 1550 - RNA, 17 nt, synthetic construct
  source 1..17: mol_type = other RNA
agggtgtgtgtgttttt

SEQ ID NO: 1551 - RNA, 21 nt, synthetic construct
  source 1..21: mol_type = other RNA
tgatgatacaggtggaggtag

SEQ ID NO: 1552 - RNA, 19 nt, synthetic construct
  source 1..19: mol_type = other RNA
aagggaagatggtgaccac

SEQ ID NO: 1553 - RNA, 22 nt, synthetic construct
  source 1..22: mol_type = other RNA
aggaagcaagagaaccctgtgg

SEQ ID NO: 1554 - RNA, 21 nt, synthetic construct
  source 1..21: mol_type = other RNA
tagtggtcagagggcttatga

SEQ ID NO: 1555 - RNA, 21 nt, synthetic construct
  source 1..21: mol_type = other RNA
ccctgggcctctgctccccag

SEQ ID NO: 1556 - RNA, 20 nt, synthetic construct
  source 1..20: mol_type = other RNA
aaaagtaattgtggtttttg

SEQ ID NO: 1557 - RNA, 23 nt, synthetic construct
  source 1..23: mol_type = other RNA
tgagcgcctcgacgacagagccg

SEQ ID NO: 1558 - RNA, 25 nt, synthetic construct
  source 1..25: mol_type = other RNA
aagggaggaggagcggaggggccct

SEQ ID NO: 1559 - RNA, 22 nt, synthetic construct
  source 1..22: mol_type = other RNA
agtattctgtaccagggaaggt

SEQ ID NO: 1560 - RNA, 19 nt, synthetic construct
  source 1..19: mol_type = other RNA
aatggatttttggagcagg

SEQ ID NO: 1561 - RNA, 22 nt, synthetic construct
  source 1..22: mol_type = other RNA
ggctggagcgagtgcagtggtg

SEQ ID NO: 1562 - RNA, 22 nt, synthetic construct
  source 1..22: mol_type = other RNA
acttacagacaagagccttgct

SEQ ID NO: 1563 - RNA, 22 nt, synthetic construct
  source 1..22: mol_type = other RNA
aagcccttaccccaaaaagtat

SEQ ID NO: 1564 - RNA, 21 nt, synthetic construct
  source 1..21: mol_type = other RNA
ggctcctcctctcaggatgtg

SEQ ID NO: 1565 - RNA, 22 nt, synthetic construct
  source 1..22: mol_type = other RNA
tggatttctttgtgaatcacca

SEQ ID NO: 1566 - RNA, 22 nt, synthetic construct
  source 1..22: mol_type = other RNA
aactccaaacactcaaaactca

SEQ ID NO: 1567 - RNA, 25 nt, synthetic construct
  source 1..25: mol_type = other RNA
tgtcacagatggccggaagagactc

SEQ ID NO: 1568 - RNA, 23 nt, synthetic construct
  source 1..23: mol_type = other RNA
ttacagttgttcaaccagttact

SEQ ID NO: 1569 - RNA, 21 nt, synthetic construct
  source 1..21: mol_type = other RNA
tctggctgctatggccccctc

SEQ ID NO: 1570 - RNA, 21 nt, synthetic construct
  source 1..21: mol_type = other RNA
gccctccgcccgtgcaccccg

SEQ ID NO: 1571 - RNA, 16 nt, synthetic construct
  source 1..16: mol_type = other RNA
ttcagcaggaacagct

SEQ ID NO: 1572 - RNA, 22 nt, synthetic construct
  source 1..22: mol_type = other RNA
aggaggaattggtgctggtctt

SEQ ID NO: 1573 - RNA, 20 nt, synthetic construct
  source 1..20: mol_type = other RNA
aaaagtaattgtggtttttg

SEQ ID NO: 1574 - RNA, 22 nt, synthetic construct
  source 1..22: mol_type = other RNA
agtgcctgctatgtgccaggca

SEQ ID NO: 1575 - RNA, 23 nt, synthetic construct
  source 1..23: mol_type = other RNA
taatactgccgggtaatgatgga

SEQ ID NO: 1576 - RNA, 22 nt, synthetic construct
  source 1..22: mol_type = other RNA
tgagggctccaggtgacggtgg

SEQ ID NO: 1577 - RNA, 23 nt, synthetic construct
  source 1..23: mol_type = other RNA
atggggacagggatcagcatggc

SEQ ID NO: 1578 - RNA, 24 nt, synthetic construct
  source 1..24: mol_type = other RNA
agcgtgggatgtccatgaagtcag

SEQ ID NO: 1579 - RNA, 23 nt, synthetic construct
  source 1..23: mol_type = other RNA
tctaaagactagacttcgctatg

SEQ ID NO: 1580 - RNA, 24 nt, synthetic construct
  source 1..24: mol_type = other RNA
agagctcacagctgtccttctcta

SEQ ID NO: 1581 - RNA, 21 nt, synthetic construct
  source 1..21: mol_type = other RNA
actccagttttagttctcttg

SEQ ID NO: 1582 - RNA, 22 nt, synthetic construct
  source 1..22: mol_type = other RNA
actgcagtgaaggcacttgtag

SEQ ID NO: 1583 - RNA, 22 nt, synthetic construct
  source 1..22: mol_type = other RNA
tgaagtaccagctactcgagag

SEQ ID NO: 1584 - RNA, 22 nt, synthetic construct
  source 1..22: mol_type = other RNA
gttctgttaacccatcccctca

SEQ ID NO: 1585 - RNA, 22 nt, synthetic construct
  source 1..22: mol_type = other RNA
tcgacagcacgacactgccttc

SEQ ID NO: 1586 - RNA, 24 nt, synthetic construct
  source 1..24: mol_type = other RNA
gacaatgatgagaagacctgagga

SEQ ID NO: 1587 - RNA, 22 nt, synthetic construct
  source 1..22: mol_type = other RNA
caccttgcgctactcaggtctg

SEQ ID NO: 1588 - RNA, 22 nt, synthetic construct
  source 1..22: mol_type = other RNA
cggcaacaagaaactgcctgag

SEQ ID NO: 1589 - RNA, 18 nt, synthetic construct
  source 1..18: mol_type = other RNA
aaagctgggttgagaagg

SEQ ID NO: 1590 - RNA, 21 nt, synthetic construct
  source 1..21: mol_type = other RNA
tgcttaaccttgccctcgaaa

SEQ ID NO: 1591 - RNA, 21 nt, synthetic construct
  source 1..21: mol_type = other RNA
cgtcccaccccccactcctgt

SEQ ID NO: 1592 - RNA, 22 nt, synthetic construct
  source 1..22: mol_type = other RNA
ctgggaggtgtgatatcgtggt

SEQ ID NO: 1593 - RNA, 22 nt, synthetic construct
  source 1..22: mol_type = other RNA
aaaggtaactgtgatttttgct

SEQ ID NO: 1594 - RNA, 22 nt, synthetic construct
  source 1..22: mol_type = other RNA
caaaaaccacagtttcttttgc

SEQ ID NO: 1595 - RNA, 22 nt, synthetic construct
  source 1..22: mol_type = other RNA
tggtcagatttgaactcttcaa

SEQ ID NO: 1596 - RNA, 23 nt, synthetic construct
  source 1..23: mol_type = other RNA
gaaggacactggtgtcaacggct

SEQ ID NO: 1597 - RNA, 17 nt, synthetic construct
  source 1..17: mol_type = other RNA
ggtgaggctagctggtg

SEQ ID NO: 1598 - RNA, 22 nt, synthetic construct
  source 1..22: mol_type = other RNA
caaaagtgattgtggtttttgc

SEQ ID NO: 1599 - RNA, 22 nt, synthetic construct
  source 1..22: mol_type = other RNA
taggccacagccacccatgtgt

SEQ ID NO: 1600 - RNA, 22 nt, synthetic construct
  source 1..22: mol_type = other RNA
ctgggctcccggacgaggcggg

SEQ ID NO: 1601 - RNA, 22 nt, synthetic construct
  source 1..22: mol_type = other RNA
gagcaggcgaggctgggctgaa

SEQ ID NO: 1602 - RNA, 22 nt, synthetic construct
  source 1..22: mol_type = other RNA
ctgcagagtttgtacggaccgg

SEQ ID NO: 1603 - RNA, 21 nt, synthetic construct
  source 1..21: mol_type = other RNA
ggccagccaccaggagggctg

SEQ ID NO: 1604 - RNA, 22 nt, synthetic construct
  source 1..22: mol_type = other RNA
agaaggcactatgagatttaga

SEQ ID NO: 1605 - RNA, 25 nt, synthetic construct
  source 1..25: mol_type = other RNA
agcggggaggaagtgggcgctgctt

SEQ ID NO: 1606 - RNA, 22 nt, synthetic construct
  source 1..22: mol_type = other RNA
tggggaaggcgtcagtgtcggg

SEQ ID NO: 1607 - RNA, 20 nt, synthetic construct
  source 1..20: mol_type = other RNA
aaagactctgcaagatgcct

SEQ ID NO: 1608 - RNA, 22 nt, synthetic construct
  source 1..22: mol_type = other RNA
gacaattgttgatcttgggcct

SEQ ID NO: 1609 - RNA, 23 nt, synthetic construct
  source 1..23: mol_type = other RNA
ggggtattgtttccgctgccagg

SEQ ID NO: 1610 - RNA, 22 nt, synthetic construct
  source 1..22: mol_type = other RNA
actcggcgtggcgtcggtcgtg

SEQ ID NO: 1611 - RNA, 21 nt, synthetic construct
  source 1..21: mol_type = other RNA
tctattccccactctccccag

SEQ ID NO: 1612 - RNA, 21 nt, synthetic construct
  source 1..21: mol_type = other RNA
atcatagaggaaaatccacgt

SEQ ID NO: 1613 - RNA, 23 nt, synthetic construct
  source 1..23: mol_type = other RNA
tgacccccatgtcgcctctgtag

SEQ ID NO: 1614 - RNA, 22 nt, synthetic construct
  source 1..22: mol_type = other RNA
cagttcagaagtgttcctgagt

SEQ ID NO: 1615 - RNA, 23 nt, synthetic construct
  source 1..23: mol_type = other RNA
tcaacaaaatcactgatgctgga

SEQ ID NO: 1616 - RNA, 24 nt, synthetic construct
  source 1..24: mol_type = other RNA
aggctctaactggctttccctgca

SEQ ID NO: 1617 - RNA, 22 nt, synthetic construct
  source 1..22: mol_type = other RNA
tgctagtctggactgatatggt

SEQ ID NO: 1618 - RNA, 22 nt, synthetic construct
  source 1..22: mol_type = other RNA
catcagttcctaatgcattgcc

SEQ ID NO: 1619 - RNA, 22 nt, synthetic construct
  source 1..22: mol_type = other RNA
tcacaagtcaggctcttgggac

SEQ ID NO: 1620 - RNA, 22 nt, synthetic construct
  source 1..22: mol_type = other RNA
aaaagtaattgcggtttttgcc

SEQ ID NO: 1621 - RNA, 22 nt, synthetic construct
  source 1..22: mol_type = other RNA
cccaatacacggtcgacctctt

SEQ ID NO: 1622 - RNA, 21 nt, synthetic construct
  source 1..21: mol_type = other RNA
tggggctagtgatgcaggacg

SEQ ID NO: 1623 - RNA, 24 nt, synthetic construct
  source 1..24: mol_type = other RNA
cctcacccagctctctggccctct

SEQ ID NO: 1624 - RNA, 22 nt, synthetic construct
  source 1..22: mol_type = other RNA
ccagtggggctgctgttatctg

SEQ ID NO: 1625 - RNA, 22 nt, synthetic construct
  source 1..22: mol_type = other RNA
tgggtgtaggctggagctgagg

SEQ ID NO: 1626 - RNA, 22 nt, synthetic construct
  source 1..22: mol_type = other RNA
cgtgtatttgacaagctgagtt

SEQ ID NO: 1627 - RNA, 21 nt, synthetic construct
  source 1..21: mol_type = other RNA
agttaatgaatcctggaaagt

SEQ ID NO: 1628 - RNA, 21 nt, synthetic construct
  source 1..21: mol_type = other RNA
aaagtgcttccttttagaggg

SEQ ID NO: 1629 - RNA, 23 nt, synthetic construct
  source 1..23: mol_type = other RNA
agaactcttgcagtcttagatgt

SEQ ID NO: 1630 - RNA, 22 nt, synthetic construct
  source 1..22: mol_type = other RNA
ggaggggtcccgcactgggagg

SEQ ID NO: 1631 - RNA, 22 nt, synthetic construct
  source 1..22: mol_type = other RNA
gcccgagaggatccgtccctgc

SEQ ID NO: 1632 - RNA, 22 nt, synthetic construct
  source 1..22: mol_type = other RNA
caaagcgctcccctttagaggt

SEQ ID NO: 1633 - RNA, 21 nt, synthetic construct
  source 1..21: mol_type = other RNA
gggagtgcagggcagggtttc

SEQ ID NO: 1634 - RNA, 21 nt, synthetic construct
  source 1..21: mol_type = other RNA
agggagggacgggggctgtgc

SEQ ID NO: 1635 - RNA, 23 nt, synthetic construct
  source 1..23: mol_type = other RNA
gtgagtgggagccggtggggctg

SEQ ID NO: 1636 - RNA, 21 nt, synthetic construct
  source 1..21: mol_type = other RNA
ttcaagtaattcaggataggt

SEQ ID NO: 1637 - RNA, 20 nt, synthetic construct
  source 1..20: mol_type = other RNA
atgagcgactgtgcctgacc

SEQ ID NO: 1638 - RNA, 22 nt, synthetic construct
  source 1..22: mol_type = other RNA
cctcttccccttgtctctccag

SEQ ID NO: 1639 - RNA, 21 nt, synthetic construct
  source 1..21: mol_type = other RNA
tttcctcatattcattcagga

SEQ ID NO: 1640 - RNA, 24 nt, synthetic construct
  source 1..24: mol_type = other RNA
ctgaagtgatgtgtaactgatcag

SEQ ID NO: 1641 - RNA, 21 nt, synthetic construct
  source 1..21: mol_type = other RNA
atgtccatattatgggttagt

SEQ ID NO: 1642 - RNA, 19 nt, synthetic construct
  source 1..19: mol_type = other RNA
cgggttgtaccttttttgc

SEQ ID NO: 1643 - RNA, 21 nt, synthetic construct
  source 1..21: mol_type = other RNA
ggcgcgcccagctcccgggct

SEQ ID NO: 1644 - RNA, 22 nt, synthetic construct
  source 1..22: mol_type = other RNA
atctgtaagagaaagtaaatga

SEQ ID NO: 1645 - RNA, 21 nt, synthetic construct
  source 1..21: mol_type = other RNA
acctcctgtgtgcatggatta

SEQ ID NO: 1646 - RNA, 21 nt, synthetic construct
  source 1..21: mol_type = other RNA
gcttgtcgctgcggtgttgct

SEQ ID NO: 1647 - RNA, 21 nt, synthetic construct
  source 1..21: mol_type = other RNA
tgcttaagttgtaccaagtat

SEQ ID NO: 1648 - RNA, 22 nt, synthetic construct
  source 1..22: mol_type = other RNA
ggctttctagtctcagctctcc

SEQ ID NO: 1649 - RNA, 21 nt, synthetic construct
  source 1..21: mol_type = other RNA
gtgccagctgcagtgggggag

SEQ ID NO: 1650 - RNA, 21 nt, synthetic construct
  source 1..21: mol_type = other RNA
tggaggagaaggaaggtgatg

SEQ ID NO: 1651 - RNA, 21 nt, synthetic construct
  source 1..21: mol_type = other RNA
tctagtaagagtggcagtcga

SEQ ID NO: 1652 - RNA, 18 nt, synthetic construct
  source 1..18: mol_type = other RNA
taaaggtttgtttgtaaa

SEQ ID NO: 1653 - RNA, 22 nt, synthetic construct
  source 1..22: mol_type = other RNA
catgccttgagtgtaggaccgt

SEQ ID NO: 1654 - RNA, 23 nt, synthetic construct
  source 1..23: mol_type = other RNA
tcgaggactggtggaagggcctt

SEQ ID NO: 1655 - RNA, 21 nt, synthetic construct
  source 1..21: mol_type = other RNA
agggccccccctcaatcctgt

SEQ ID NO: 1656 - RNA, 22 nt, synthetic construct
  source 1..22: mol_type = other RNA
ctcctgactccaggtcctgtgt

SEQ ID NO: 1657 - RNA, 21 nt, synthetic construct
  source 1..21: mol_type = other RNA
gagcccctctctgctctccag

SEQ ID NO: 1658 - RNA, 20 nt, synthetic construct
  source 1..20: mol_type = other RNA
ctaggtggggggcttgaagc

SEQ ID NO: 1659 - RNA, 23 nt, synthetic construct
  source 1..23: mol_type = other RNA
tgagtaccgccatgtctgttggg

SEQ ID NO: 1660 - RNA, 23 nt, synthetic construct
  source 1..23: mol_type = other RNA
taaagtgcttatagtgcaggtag

SEQ ID NO: 1661 - RNA, 19 nt, synthetic construct
  source 1..19: mol_type = other RNA
actggaattggagtcaaaa

SEQ ID NO: 1662 - RNA, 22 nt, synthetic construct
  source 1..22: mol_type = other RNA
tatccagcttgttactatatgc

SEQ ID NO: 1663 - RNA, 20 nt, synthetic construct
  source 1..20: mol_type = other RNA
atcgctttaccattcatgtt

SEQ ID NO: 1664 - RNA, 21 nt, synthetic construct
  source 1..21: mol_type = other RNA
ctcccacatgcagggtttgca

SEQ ID NO: 1665 - RNA, 22 nt, synthetic construct
  source 1..22: mol_type = other RNA
tgtgggatctggaggcatctgg

SEQ ID NO: 1666 - RNA, 21 nt, synthetic construct
  source 1..21: mol_type = other RNA
caacaccagtcgatgggctgt

SEQ ID NO: 1667 - RNA, 23 nt, synthetic construct
  source 1..23: mol_type = other RNA
gagaggaacatgggctcaggaca

SEQ ID NO: 1668 - RNA, 22 nt, synthetic construct
  source 1..22: mol_type = other RNA
atgtgcctgagggagtaagaca

SEQ ID NO: 1669 - RNA, 22 nt, synthetic construct
  source 1..22: mol_type = other RNA
tggtctgcaaagagatgactgt

SEQ ID NO: 1670 - RNA, 25 nt, synthetic construct
  source 1..25: mol_type = other RNA
taggggtgggggaattcaggggtgt

SEQ ID NO: 1671 - RNA, 22 nt, synthetic construct
  source 1..22: mol_type = other RNA
attgtccttgctgtttggagat

SEQ ID NO: 1672 - RNA, 21 nt, synthetic construct
  source 1..21: mol_type = other RNA
tgttctctttgccaaggacag

SEQ ID NO: 1673 - RNA, 22 nt, synthetic construct
  source 1..22: mol_type = other RNA
tcagtgcatcacagaactttgt

SEQ ID NO: 1674 - RNA, 21 nt, synthetic construct
  source 1..21: mol_type = other RNA
gtgagacttctctcccttcag

SEQ ID NO: 1675 - RNA, 21 nt, synthetic construct
  source 1..21: mol_type = other RNA
taattttatgtataagctagt

SEQ ID NO: 1676 - RNA, 21 nt, synthetic construct
  source 1..21: mol_type = other RNA
ggctgggtgctcttgtgcagt

SEQ ID NO: 1677 - RNA, 22 nt, synthetic construct
  source 1..22: mol_type = other RNA
aacccgtagatccgaacttgtg

SEQ ID NO: 1678 - RNA, 23 nt, synthetic construct
  source 1..23: mol_type = other RNA
caaagactgcaattacttttgcg

SEQ ID NO: 1679 - RNA, 23 nt, synthetic construct
  source 1..23: mol_type = other RNA
ccttcactgtgactctgctgcag

SEQ ID NO: 1680 - RNA, 25 nt, synthetic construct
  source 1..25: mol_type = other RNA
acttgggcaggagggaccctgtatg

SEQ ID NO: 1681 - RNA, 18 nt, synthetic construct
  source 1..18: mol_type = other RNA
attctaagtgccttggcc

SEQ ID NO: 1682 - RNA, 22 nt, synthetic construct
  source 1..22: mol_type = other RNA
aaaagctgggttgagagggcga

SEQ ID NO: 1683 - RNA, 24 nt, synthetic construct
  source 1..24: mol_type = other RNA
ctatggcgagactggcatgtactc

SEQ ID NO: 1684 - RNA, 21 nt, synthetic construct
  source 1..21: mol_type = other RNA
atacatgtcagattgtatgcc

SEQ ID NO: 1685 - RNA, 21 nt, synthetic construct
  source 1..21: mol_type = other RNA
gtgtgaccaccgttcctgcag

SEQ ID NO: 1686 - RNA, 23 nt, synthetic construct
  source 1..23: mol_type = other RNA
agccgctcttctccctgcccaca

SEQ ID NO: 1687 - RNA, 21 nt, synthetic construct
  source 1..21: mol_type = other RNA
gtgtcttttgctctgcagtca

SEQ ID NO: 1688 - RNA, 23 nt, synthetic construct
  source 1..23: mol_type = other RNA
gagggcagcgtgggtgtggcgga

SEQ ID NO: 1689 - RNA, 23 nt, synthetic construct
  source 1..23: mol_type = other RNA
cagtgcaatagtattgtcaaagc

SEQ ID NO: 1690 - RNA, 22 nt, synthetic construct
  source 1..22: mol_type = other RNA
ctcctgagccattctgagcctc

SEQ ID NO: 1691 - RNA, 23 nt, synthetic construct
  source 1..23: mol_type = other RNA
agggactgccttaggagaaagtt

SEQ ID NO: 1692 - RNA, 21 nt, synthetic construct
  source 1..21: mol_type = other RNA
tcagtgcatgacagaacttgg

SEQ ID NO: 1693 - RNA, 22 nt, synthetic construct
  source 1..22: mol_type = other RNA
ttatcagaatctccaggggtac

SEQ ID NO: 1694 - RNA, 21 nt, synthetic construct
  source 1..21: mol_type = other RNA
tgcggccggtgctcaacctgc

SEQ ID NO: 1695 - RNA, 21 nt, synthetic construct
  source 1..21: mol_type = other RNA
actgagcctctctctctccag

SEQ ID NO: 1696 - RNA, 22 nt, synthetic construct
  source 1..22: mol_type = other RNA
aacactggccttgctatcccca

SEQ ID NO: 1697 - RNA, 22 nt, synthetic construct
  source 1..22: mol_type = other RNA
catgggagttcggggtggttgc

SEQ ID NO: 1698 - RNA, 21 nt, synthetic construct
  source 1..21: mol_type = other RNA
aatattatacagtcaacctct

SEQ ID NO: 1699 - RNA, 23 nt, synthetic construct
  source 1..23: mol_type = other RNA
tgggaggggagaggcagcaagca

SEQ ID NO: 1700 - RNA, 22 nt, synthetic construct
  source 1..22: mol_type = other RNA
atcacattgccagtgattaccc

SEQ ID NO: 1701 - RNA, 21 nt, synthetic construct
  source 1..21: mol_type = other RNA
acacatgggtggctgtggcct

SEQ ID NO: 1702 - RNA, 22 nt, synthetic construct
  source 1..22: mol_type = other RNA
atcgtgcatccttttagagtgt

SEQ ID NO: 1703 - RNA, 22 nt, synthetic construct
  source 1..22: mol_type = other RNA
aaagtgcttccttttagagggt

SEQ ID NO: 1704 - RNA, 24 nt, synthetic construct
  source 1..24: mol_type = other RNA
aagctcaggtttgagaactgctga

SEQ ID NO: 1705 - RNA, 16 nt, synthetic construct
  source 1..16: mol_type = other RNA
gcagcattcatgtccc

SEQ ID NO: 1706 - RNA, 22 nt, synthetic construct
  source 1..22: mol_type = other RNA
accagcctgtgtccacctccag

SEQ ID NO: 1707 - RNA, 21 nt, synthetic construct
  source 1..21: mol_type = other RNA
tgggagctaagctatgggtat

SEQ ID NO: 1708 - RNA, 21 nt, synthetic construct
  source 1..21: mol_type = other RNA
gcagttctgagcacagtacac

SEQ ID NO: 1709 - RNA, 22 nt, synthetic construct
  source 1..22: mol_type = other RNA
tgattggtacgtctgtgggtag

SEQ ID NO: 1710 - RNA, 22 nt, synthetic construct
  source 1..22: mol_type = other RNA
acctgccagcacctccctgcag

SEQ ID NO: 1711 - RNA, 22 nt, synthetic construct
  source 1..22: mol_type = other RNA
tgggcgagggcggctgagcggc

SEQ ID NO: 1712 - RNA, 22 nt, synthetic construct
  source 1..22: mol_type = other RNA
gaggaaactgaagctgagaggg

SEQ ID NO: 1713 - RNA, 22 nt, synthetic construct
  source 1..22: mol_type = other RNA
ttaactcctttcacacccatgg

SEQ ID NO: 1714 - RNA, 22 nt, synthetic construct
  source 1..22: mol_type = other RNA
ttctggatatgaagacaatcaa

SEQ ID NO: 1715 - RNA, 22 nt, synthetic construct
  source 1..22: mol_type = other RNA
tcaaaactgaggggcattttct

SEQ ID NO: 1716 - RNA, 22 nt, synthetic construct
  source 1..22: mol_type = other RNA
caactagactgtgagcttctag

SEQ ID NO: 1717 - RNA, 22 nt, synthetic construct
  source 1..22: mol_type = other RNA
tgaggtagtagtttgtgctgtt

SEQ ID NO: 1718 - RNA, 20 nt, synthetic construct
  source 1..20: mol_type = other RNA
attcctagaaattgttcata

SEQ ID NO: 1719 - RNA, 18 nt, synthetic construct
  source 1..18: mol_type = other RNA
cccctgggccggccttgg

SEQ ID NO: 1720 - RNA, 22 nt, synthetic construct
  source 1..22: mol_type = other RNA
aatttactctgcaatcttctcc

SEQ ID NO: 1721 - RNA, 22 nt, synthetic construct
  source 1..22: mol_type = other RNA
agaaggaaattgaattcattta

SEQ ID NO: 1722 - RNA, 20 nt, synthetic construct
  source 1..20: mol_type = other RNA
gcacccaggcaaggattctg

SEQ ID NO: 1723 - RNA, 22 nt, synthetic construct
  source 1..22: mol_type = other RNA
tatggaggttctagaccatgtt

SEQ ID NO: 1724 - RNA, 22 nt, synthetic construct
  source 1..22: mol_type = other RNA
actaaaggatatagaaggtttt

SEQ ID NO: 1725 - RNA, 19 nt, synthetic construct
  source 1..19: mol_type = other RNA
ggggagcgaggggcggggc

SEQ ID NO: 1726 - RNA, 22 nt, synthetic construct
  source 1..22: mol_type = other RNA
tatgtctgctgaccatcacctt

SEQ ID NO: 1727 - RNA, 22 nt, synthetic construct
  source 1..22: mol_type = other RNA
tctgtgatagagattctttgct

SEQ ID NO: 1728 - RNA, 22 nt, synthetic construct
  source 1..22: mol_type = other RNA
taatactgtctggtaaaaccgt

SEQ ID NO: 1729 - RNA, 22 nt, synthetic construct
  source 1..22: mol_type = other RNA
tcagttccaggccaaccaggct

SEQ ID NO: 1730 - RNA, 22 nt, synthetic construct
  source 1..22: mol_type = other RNA
caccggggatggcagagggtcg

SEQ ID NO: 1731 - RNA, 23 nt, synthetic construct
  source 1..23: mol_type = other RNA
tgattgtagccttttggagtaga

SEQ ID NO: 1732 - RNA, 21 nt, synthetic construct
  source 1..21: mol_type = other RNA
ccaaatcttgatcagaagcct

SEQ ID NO: 1733 - RNA, 22 nt, synthetic construct
  source 1..22: mol_type = other RNA
caggcagggaggtgggaccatg

SEQ ID NO: 1734 - RNA, 21 nt, synthetic construct
  source 1..21: mol_type = other RNA
accagggccagcagggaatgt

SEQ ID NO: 1735 - RNA, 22 nt, synthetic construct
  source 1..22: mol_type = other RNA
catcttactgggcagcattgga

SEQ ID NO: 1736 - RNA, 20 nt, synthetic construct
  source 1..20: mol_type = other RNA
acccctgccactcactggcc

SEQ ID NO: 1737 - RNA, 22 nt, synthetic construct
  source 1..22: mol_type = other RNA
aaaagtaattgtggtttttgcc

SEQ ID NO: 1738 - RNA, 22 nt, synthetic construct
  source 1..22: mol_type = other RNA
ctgccctagtctagctgaagct

SEQ ID NO: 1739 - RNA, 24 nt, synthetic construct
  source 1..24: mol_type = other RNA
tttcctctctgccccatagggtgt

SEQ ID NO: 1740 - RNA, 22 nt, synthetic construct
  source 1..22: mol_type = other RNA
cgcatcccctagggcattggtg

SEQ ID NO: 1741 - RNA, 20 nt, synthetic construct
  source 1..20: mol_type = other RNA
ggtatccgtttggggatggt

SEQ ID NO: 1742 - RNA, 21 nt, synthetic construct
  source 1..21: mol_type = other RNA
gagtgtagttctgagcagagc

SEQ ID NO: 1743 - RNA, 22 nt, synthetic construct
  source 1..22: mol_type = other RNA
cctattcttggttacttgcacg

SEQ ID NO: 1744 - RNA, 22 nt, synthetic construct
  source 1..22: mol_type = other RNA
aaggggcagggacgggtggccc

SEQ ID NO: 1745 - RNA, 25 nt, synthetic construct
  source 1..25: mol_type = other RNA
ttggggtttggggtgcagacattgc

SEQ ID NO: 1746 - RNA, 22 nt, synthetic construct
  source 1..22: mol_type = other RNA
tgtgaggttggcattgttgtct

SEQ ID NO: 1747 - RNA, 22 nt, synthetic construct
  source 1..22: mol_type = other RNA
ctcatttaagtagtctgatgcc

SEQ ID NO: 1748 - RNA, 25 nt, synthetic construct
  source 1..25: mol_type = other RNA
aaaaaccacaattacttttgcacca

SEQ ID NO: 1749 - RNA, 24 nt, synthetic construct
  source 1..24: mol_type = other RNA
ggctcaatctctggtcctgcagcc

SEQ ID NO: 1750 - RNA, 22 nt, synthetic construct
  source 1..22: mol_type = other RNA
ttcagccaggctagtgcagtct

SEQ ID NO: 1751 - RNA, 22 nt, synthetic construct
  source 1..22: mol_type = other RNA
aatcatacacggttgacctatt

SEQ ID NO: 1752 - RNA, 22 nt, synthetic construct
  source 1..22: mol_type = other RNA
aacgccattatcacactaaata

SEQ ID NO: 1753 - RNA, 23 nt, synthetic construct
  source 1..23: mol_type = other RNA
ctggagatatggaagagctgtgt

SEQ ID NO: 1754 - RNA, 23 nt, synthetic construct
  source 1..23: mol_type = other RNA
ctgggatctccggggtcttggtt

SEQ ID NO: 1755 - RNA, 17 nt, synthetic construct
  source 1..17: mol_type = other RNA
gagttctacagtcagac

SEQ ID NO: 1756 - RNA, 21 nt, synthetic construct
  source 1..21: mol_type = other RNA
tgagatgaagcactgtagctc

SEQ ID NO: 1757 - RNA, 23 nt, synthetic construct
  source 1..23: mol_type = other RNA
atggagctggaaccagatcaggc

SEQ ID NO: 1758 - RNA, 18 nt, synthetic construct
  source 1..18: mol_type = other RNA
tgcttcctttcagagggt

SEQ ID NO: 1759 - RNA, 22 nt, synthetic construct
  source 1..22: mol_type = other RNA
ttgttctttggtctttcagcca

SEQ ID NO: 1760 - RNA, 23 nt, synthetic construct
  source 1..23: mol_type = other RNA
taccctgtagaaccgaatttgtg

SEQ ID NO: 1761 - RNA, 23 nt, synthetic construct
  source 1..23: mol_type = other RNA
aatagctcagaatgtcagttctg

SEQ ID NO: 1762 - RNA, 22 nt, synthetic construct
  source 1..22: mol_type = other RNA
tagggtagacactgacaacgtt

SEQ ID NO: 1763 - RNA, 22 nt, synthetic construct
  source 1..22: mol_type = other RNA
ggctcatgtgtctgtcctcttc

SEQ ID NO: 1764 - RNA, 22 nt, synthetic construct
  source 1..22: mol_type = other RNA
aagtgctgtcatagctgaggtc

SEQ ID NO: 1765 - RNA, 22 nt, synthetic construct
  source 1..22: mol_type = other RNA
ttgcatagtcacaaaagtgatc

SEQ ID NO: 1766 - RNA, 20 nt, synthetic construct
  source 1..20: mol_type = other RNA
ggatccgagtcacggcacca

SEQ ID NO: 1767 - RNA, 20 nt, synthetic construct
  source 1..20: mol_type = other RNA
agcacactgagcgagcggac

SEQ ID NO: 1768 - RNA, 22 nt, synthetic construct
  source 1..22: mol_type = other RNA
tctctctcccacttccctgcag

SEQ ID NO: 1769 - RNA, 23 nt, synthetic construct
  source 1..23: mol_type = other RNA
agctcggtctgaggcccctcagt

SEQ ID NO: 1770 - RNA, 22 nt, synthetic construct
  source 1..22: mol_type = other RNA
ctaggtatggtcccagggatcc

SEQ ID NO: 1771 - RNA, 21 nt, synthetic construct
  source 1..21: mol_type = other RNA
ctatatatcaaacatattcct

SEQ ID NO: 1772 - RNA, 21 nt, synthetic construct
  source 1..21: mol_type = other RNA
tgagctaaatgtgtgctggga

SEQ ID NO: 1773 - RNA, 22 nt, synthetic construct
  source 1..22: mol_type = other RNA
ggtccagaggggagataggttc

SEQ ID NO: 1774 - RNA, 21 nt, synthetic construct
  source 1..21: mol_type = other RNA
tgtggtagatatatgcacgat

SEQ ID NO: 1775 - RNA, 22 nt, synthetic construct
  source 1..22: mol_type = other RNA
tttagattgaacatgaagttag

SEQ ID NO: 1776 - RNA, 22 nt, synthetic construct
  source 1..22: mol_type = other RNA
atatgtatatgtgactgctact

SEQ ID NO: 1777 - RNA, 20 nt, synthetic construct
  source 1..20: mol_type = other RNA
aataatatcacagtaggtgt

SEQ ID NO: 1778 - RNA, 22 nt, synthetic construct
  source 1..22: mol_type = other RNA
agtggggtgggacccagctgtt

SEQ ID NO: 1779 - RNA, 23 nt, synthetic construct
  source 1..23: mol_type = other RNA
ccagttaccgcttccgctaccgc

SEQ ID NO: 1780 - RNA, 25 nt, synthetic construct
  source 1..25: mol_type = other RNA
gctgggcagggcttctgagctcctt

SEQ ID NO: 1781 - RNA, 24 nt, synthetic construct
  source 1..24: mol_type = other RNA
cctggggacaggggattggggcag

SEQ ID NO: 1782 - RNA, 21 nt, synthetic construct
  source 1..21: mol_type = other RNA
tcgtgtccctcttgtccacag

SEQ ID NO: 1783 - RNA, 22 nt, synthetic construct
  source 1..22: mol_type = other RNA
tttaagcaggaaatagaattta

SEQ ID NO: 1784 - RNA, 22 nt, synthetic construct
  source 1..22: mol_type = other RNA
ggggctggggccggggccgagc

SEQ ID NO: 1785 - RNA, 22 nt, synthetic construct
  source 1..22: mol_type = other RNA
ctggtacaggcctgggggacag

SEQ ID NO: 1786 - RNA, 20 nt, synthetic construct
  source 1..20: mol_type = other RNA
tcactacctgacaatacagt

SEQ ID NO: 1787 - RNA, 22 nt, synthetic construct
  source 1..22: mol_type = other RNA
gaaagtaattgctgtttttgcc

SEQ ID NO: 1788 - RNA, 22 nt, synthetic construct
  source 1..22: mol_type = other RNA
ttccctatctcactctcctcag

SEQ ID NO: 1789 - RNA, 22 nt, synthetic construct
  source 1..22: mol_type = other RNA
caaaccacactgtggtgttaga

SEQ ID NO: 1790 - RNA, 22 nt, synthetic construct
  source 1..22: mol_type = other RNA
ctgggaggtgtgatattgtggt

SEQ ID NO: 1791 - RNA, 22 nt, synthetic construct
  source 1..22: mol_type = other RNA
caaaaaccatagttacttttgc

SEQ ID NO: 1792 - RNA, 22 nt, synthetic construct
  source 1..22: mol_type = other RNA
tgatggagctgggaatactctg

SEQ ID NO: 1793 - RNA, 18 nt, synthetic construct
  source 1..18: mol_type = other RNA
ccgctttctgagctggac

SEQ ID NO: 1794 - RNA, 22 nt, synthetic construct
  source 1..22: mol_type = other RNA
ttgtgtgagtacagagagcatc

SEQ ID NO: 1795 - RNA, 23 nt, synthetic construct
  source 1..23: mol_type = other RNA
actgggatgtcactgaatatggt

SEQ ID NO: 1796 - RNA, 21 nt, synthetic construct
  source 1..21: mol_type = other RNA
ctgtcctaaggttgttgagtt

SEQ ID NO: 1797 - RNA, 22 nt, synthetic construct
  source 1..22: mol_type = other RNA
tgggccatgcatttctagaact

SEQ ID NO: 1798 - RNA, 19 nt, synthetic construct
  source 1..19: mol_type = other RNA
atcgggccctcggcgccgg

SEQ ID NO: 1799 - RNA, 22 nt, synthetic construct
  source 1..22: mol_type = other RNA
caggtagatatttgataggcat

SEQ ID NO: 1800 - RNA, 22 nt, synthetic construct
  source 1..22: mol_type = other RNA
tcctcctctacctcatcccagt

SEQ ID NO: 1801 - RNA, 22 nt, synthetic construct
  source 1..22: mol_type = other RNA
atcatagaggaaaatccatgtt

SEQ ID NO: 1802 - RNA, 22 nt, synthetic construct
  source 1..22: mol_type = other RNA
gagggcagagccagcttcctga

SEQ ID NO: 1803 - RNA, 22 nt, synthetic construct
  source 1..22: mol_type = other RNA
tgcctcttttccacggcctcag

SEQ ID NO: 1804 - RNA, 22 nt, synthetic construct
  source 1..22: mol_type = other RNA
cagttgggtctaggggtcagga

SEQ ID NO: 1805 - RNA, 20 nt, synthetic construct
  source 1..20: mol_type = other RNA
actcaaactgtgggggcact

SEQ ID NO: 1806 - RNA, 22 nt, synthetic construct
  source 1..22: mol_type = other RNA
caaaagcaatcgcggtttttgc

SEQ ID NO: 1807 - RNA, 22 nt, synthetic construct
  source 1..22: mol_type = other RNA
tttaggataagcttgacttttg

SEQ ID NO: 1808 - RNA, 24 nt, synthetic construct
  source 1..24: mol_type = other RNA
catagatctcgtcgcttactggga

SEQ ID NO: 1809 - RNA, 22 nt, synthetic construct
  source 1..22: mol_type = other RNA
actggacttagggtcagaaggc

SEQ ID NO: 1810 - RNA, 22 nt, synthetic construct
  source 1..22: mol_type = other RNA
atggcatcgtcccctggtggct

SEQ ID NO: 1811 - RNA, 21 nt, synthetic construct
  source 1..21: mol_type = other RNA
gtaccttctggttcagctagt

SEQ ID NO: 1812 - RNA, 21 nt, synthetic construct
  source 1..21: mol_type = other RNA
cagggccctggctttagcaga

SEQ ID NO: 1813 - RNA, 19 nt, synthetic construct
  source 1..19: mol_type = other RNA
tggatgacagtggaggcct

SEQ ID NO: 1814 - RNA, 22 nt, synthetic construct
  source 1..22: mol_type = other RNA
tgagacaggcttatgctgctat

SEQ ID NO: 1815 - RNA, 22 nt, synthetic construct
  source 1..22: mol_type = other RNA
ggagactgatgagttcccggga

SEQ ID NO: 1816 - RNA, 22 nt, synthetic construct
  source 1..22: mol_type = other RNA
aacacacctattcaaggattca

SEQ ID NO: 1817 - RNA, 23 nt, synthetic construct
  source 1..23: mol_type = other RNA
tgccccacctgctgaccaccctc

SEQ ID NO: 1818 - RNA, 22 nt, synthetic construct
  source 1..22: mol_type = other RNA
atggtaccctggcatactgagt

SEQ ID NO: 1819 - RNA, 22 nt, synthetic construct
  source 1..22: mol_type = other RNA
ttccagcccttctaatggtagg

SEQ ID NO: 1820 - RNA, 22 nt, synthetic construct
  source 1..22: mol_type = other RNA
tgtgtggatcctggaggaggca

SEQ ID NO: 1821 - RNA, 20 nt, synthetic construct
  source 1..20: mol_type = other RNA
ggtagtgagttatcagctac

SEQ ID NO: 1822 - RNA, 21 nt, synthetic construct
  source 1..21: mol_type = other RNA
agtgaatgatgggttctgacc

SEQ ID NO: 1823 - RNA, 20 nt, synthetic construct
  source 1..20: mol_type = other RNA
gtccctgagtgtatgtggtg

SEQ ID NO: 1824 - RNA, 20 nt, synthetic construct
  source 1..20: mol_type = other RNA
aaaagctgggctgagaggcg

SEQ ID NO: 1825 - RNA, 23 nt, synthetic construct
  source 1..23: mol_type = other RNA
tgcatcaggccagaagacatgag

SEQ ID NO: 1826 - RNA, 22 nt, synthetic construct
  source 1..22: mol_type = other RNA
aaaatgaaatgagcccagccca

SEQ ID NO: 1827 - RNA, 22 nt, synthetic construct
  source 1..22: mol_type = other RNA
actggggagcagaaggagaacc

SEQ ID NO: 1828 - RNA, 19 nt, synthetic construct
  source 1..19: mol_type = other RNA
aaggggctgggggagcaca

SEQ ID NO: 1829 - RNA, 23 nt, synthetic construct
  source 1..23: mol_type = other RNA
tgagaactgaattccataggctg

SEQ ID NO: 1830 - RNA, 23 nt, synthetic construct
  source 1..23: mol_type = other RNA
agaaaggtggaggggttgtcaga

SEQ ID NO: 1831 - RNA, 22 nt, synthetic construct
  source 1..22: mol_type = other RNA
actggacttggagtcagaaggc

SEQ ID NO: 1832 - RNA, 19 nt, synthetic construct
  source 1..19: mol_type = other RNA
aggtgtgtctgtagagtcc

SEQ ID NO: 1833 - RNA, 22 nt, synthetic construct
  source 1..22: mol_type = other RNA
aactcacgaagtataccgaagt

SEQ ID NO: 1834 - RNA, 22 nt, synthetic construct
  source 1..22: mol_type = other RNA
gtatacacctgatatgtgtatg

SEQ ID NO: 1835 - RNA, 23 nt, synthetic construct
  source 1..23: mol_type = other RNA
tatctgctgggctttctggtgtt

SEQ ID NO: 1836 - RNA, 22 nt, synthetic construct
  source 1..22: mol_type = other RNA
tttggtccccttcaaccagcta

SEQ ID NO: 1837 - RNA, 26 nt, synthetic construct
  source 1..26: mol_type = other RNA
ttcagggatggcgcatgaagaggaga

SEQ ID NO: 1838 - RNA, 22 nt, synthetic construct
  source 1..22: mol_type = other RNA
caaaaactgcagttacttttgc

SEQ ID NO: 1839 - RNA, 21 nt, synthetic construct
  source 1..21: mol_type = other RNA
gctggtctgcgtggtgctcgg

SEQ ID NO: 1840 - RNA, 25 nt, synthetic construct
  source 1..25: mol_type = other RNA
catgctgacctccctcctgccccag

SEQ ID NO: 1841 - RNA, 21 nt, synthetic construct
  source 1..21: mol_type = other RNA
aggttgtctgtgatgagttcg

SEQ ID NO: 1842 - RNA, 22 nt, synthetic construct
  source 1..22: mol_type = other RNA
cttccggtctgtgagccccgtc

SEQ ID NO: 1843 - RNA, 22 nt, synthetic construct
  source 1..22: mol_type = other RNA
gctggtgcaaaagtaatggcgg

SEQ ID NO: 1844 - RNA, 22 nt, synthetic construct
  source 1..22: mol_type = other RNA
tagcagcacatcatggtttaca

SEQ ID NO: 1845 - RNA, 19 nt, synthetic construct
  source 1..19: mol_type = other RNA
ttgccatgtctaagaagaa

SEQ ID NO: 1846 - RNA, 20 nt, synthetic construct
  source 1..20: mol_type = other RNA
gtccgctcggcggtggccca

SEQ ID NO: 1847 - RNA, 20 nt, synthetic construct
  source 1..20: mol_type = other RNA
taacggccgcggtaccctaa

SEQ ID NO: 1848 - RNA, 17 nt, synthetic construct
  source 1..17: mol_type = other RNA
gaggctgagctgaggag

SEQ ID NO: 1849 - RNA, 19 nt, synthetic construct
  source 1..19: mol_type = other RNA
aatgttttttcctgtttcc

SEQ ID NO: 1850 - RNA, 21 nt, synthetic construct
  source 1..21: mol_type = other RNA
agccgcggggatcgccgaggg

SEQ ID NO: 1851 - RNA, 24 nt, synthetic construct
  source 1..24: mol_type = other RNA
aggagcagtgccggccaaggcgcc

SEQ ID NO: 1852 - RNA, 21 nt, synthetic construct
  source 1..21: mol_type = other RNA
aattacagattgtctcagaga

SEQ ID NO: 1853 - RNA, 20 nt, synthetic construct
  source 1..20: mol_type = other RNA
gtgagtcagggtggggctgg

SEQ ID NO: 1854 - RNA, 21 nt, synthetic construct
  source 1..21: mol_type = other RNA
ccaccgggggatgaatgtcac

SEQ ID NO: 1855 - RNA, 21 nt, synthetic construct
  source 1..21: mol_type = other RNA
tcacagtgaaccggtctcttt

SEQ ID NO: 1856 - RNA, 20 nt, synthetic construct
  source 1..20: mol_type = other RNA
tgggctgctgagaaggggca

SEQ ID NO: 1857 - RNA, 21 nt, synthetic construct
  source 1..21: mol_type = other RNA
ttttaaggacactgagggatc

SEQ ID NO: 1858 - RNA, 23 nt, synthetic construct
  source 1..23: mol_type = other RNA
cagggaggcgctcactctctgct

SEQ ID NO: 1859 - RNA, 22 nt, synthetic construct
  source 1..22: mol_type = other RNA
cggggagagaacgcagtgacgt

SEQ ID NO: 1860 - RNA, 21 nt, synthetic construct
  source 1..21: mol_type = other RNA
cctgcagagaggaagcccttc

SEQ ID NO: 1861 - RNA, 22 nt, synthetic construct
  source 1..22: mol_type = other RNA
tgccgccctctcgctgctctag

SEQ ID NO: 1862 - RNA, 21 nt, synthetic construct
  source 1..21: mol_type = other RNA
tccttctgctccgtcccccag

SEQ ID NO: 1863 - RNA, 25 nt, synthetic construct
  source 1..25: mol_type = other RNA
aaatatgatgaaactcacagctgag

SEQ ID NO: 1864 - RNA, 22 nt, synthetic construct
  source 1..22: mol_type = other RNA
ctcctacatattagcattaaca

SEQ ID NO: 1865 - RNA, 23 nt, synthetic construct
  source 1..23: mol_type = other RNA
tctggcaagtaaaaaactctcat

SEQ ID NO: 1866 - RNA, 18 nt, synthetic construct
  source 1..18: mol_type = other RNA
cgggcgtggtggtggggg

SEQ ID NO: 1867 - RNA, 22 nt, synthetic construct
  source 1..22: mol_type = other RNA
caggatccacagagctagtcca

SEQ ID NO: 1868 - RNA, 20 nt, synthetic construct
  source 1..20: mol_type = other RNA
tctggtcctggacaggaggc

SEQ ID NO: 1869 - RNA, 20 nt, synthetic construct
  source 1..20: mol_type = other RNA
atctgctctcttgttcccag

SEQ ID NO: 1870 - RNA, 18 nt, synthetic construct
  source 1..18: mol_type = other RNA
ctcgagttggaagaggcg

SEQ ID NO: 1871 - RNA, 20 nt, synthetic construct
  source 1..20: mol_type = other RNA
cgtggattgtctggatgcat

SEQ ID NO: 1872 - RNA, 22 nt, synthetic construct
  source 1..22: mol_type = other RNA
tagggatgggaggccaggatga

SEQ ID NO: 1873 - RNA, 22 nt, synthetic construct
  source 1..22: mol_type = other RNA
aatcctttgtccctgggtgaga

SEQ ID NO: 1874 - RNA, 22 nt, synthetic construct
  source 1..22: mol_type = other RNA
aagcagcagtggcaagactcct

SEQ ID NO: 1875 - RNA, 21 nt, synthetic construct
  source 1..21: mol_type = other RNA
aggggtgctatctgtgattga

SEQ ID NO: 1876 - RNA, 23 nt, synthetic construct
  source 1..23: mol_type = other RNA
tagagaggggaaggatgtgatgt

SEQ ID NO: 1877 - RNA, 23 nt, synthetic construct
  source 1..23: mol_type = other RNA
ctctcaccactgccctcccacag

SEQ ID NO: 1878 - RNA, 22 nt, synthetic construct
  source 1..22: mol_type = other RNA
tctatacagaccctggcttttc

SEQ ID NO: 1879 - RNA, 22 nt, synthetic construct
  source 1..22: mol_type = other RNA
agacacatttggagagggaacc

SEQ ID NO: 1880 - RNA, 24 nt, synthetic construct
  source 1..24: mol_type = other RNA
gtgggtagggtttgggggagagcg

SEQ ID NO: 1881 - RNA, 23 nt, synthetic construct
  source 1..23: mol_type = other RNA
agaagaaggcggtcggtctgcgg

SEQ ID NO: 1882 - RNA, 20 nt, synthetic construct
  source 1..20: mol_type = other RNA
tcagggagtcaggggagggc

SEQ ID NO: 1883 - RNA, 22 nt, synthetic construct
  source 1..22: mol_type = other RNA
gatgagctcattgtaatatgag

SEQ ID NO: 1884 - RNA, 22 nt, synthetic construct
  source 1..22: mol_type = other RNA
tcaatcacttggtaattgctgt

SEQ ID NO: 1885 - RNA, 22 nt, synthetic construct
  source 1..22: mol_type = other RNA
ctctagagggaagcgctttctg

SEQ ID NO: 1886 - RNA, 22 nt, synthetic construct
  source 1..22: mol_type = other RNA
aatcagtgaatgccttgaacct

SEQ ID NO: 1887 - RNA, 22 nt, synthetic construct
  source 1..22: mol_type = other RNA
gcagagtgcaaacaattttgac

SEQ ID NO: 1888 - RNA, 22 nt, synthetic construct
  source 1..22: mol_type = other RNA
ggattcctggaaatactgttct

SEQ ID NO: 1889 - RNA, 23 nt, synthetic construct
  source 1..23: mol_type = other RNA
gcgacgagcccctcgcacaaacc

SEQ ID NO: 1890 - RNA, 21 nt, synthetic construct
  source 1..21: mol_type = other RNA
ggttcttagcataggaggtct

SEQ ID NO: 1891 - RNA, 23 nt, synthetic construct
  source 1..23: mol_type = other RNA
cgggctgtccggaggggtcggct

SEQ ID NO: 1892 - RNA, 24 nt, synthetic construct
  source 1..24: mol_type = other RNA
gtaggggcgtcccgggcgcgcggg

SEQ ID NO: 1893 - RNA, 21 nt, synthetic construct
  source 1..21: mol_type = other RNA
caaaagtgatcgtggtttttg

SEQ ID NO: 1894 - RNA, 22 nt, synthetic construct
  source 1..22: mol_type = other RNA
tagcaccatttgaaatcggtta

SEQ ID NO: 1895 - RNA, 22 nt, synthetic construct
  source 1..22: mol_type = other RNA
tgaggtagtagattgtatagtt

SEQ ID NO: 1896 - RNA, 22 nt, synthetic construct
  source 1..22: mol_type = other RNA
aagacgggaggaaagaagggag

SEQ ID NO: 1897 - RNA, 21 nt, synthetic construct
  source 1..21: mol_type = other RNA
tcctgcgcgtcccagatgccc

SEQ ID NO: 1898 - RNA, 22 nt, synthetic construct
  source 1..22: mol_type = other RNA
tgggggtggtctctagccaagg

SEQ ID NO: 1899 - RNA, 23 nt, synthetic construct
  source 1..23: mol_type = other RNA
tgagtggggctcccgggacggcg

SEQ ID NO: 1900 - RNA, 22 nt, synthetic construct
  source 1..22: mol_type = other RNA
catctctaaggaactcccccaa

SEQ ID NO: 1901 - RNA, 22 nt, synthetic construct
  source 1..22: mol_type = other RNA
tgggggaggaaggacaggccat

SEQ ID NO: 1902 - RNA, 22 nt, synthetic construct
  source 1..22: mol_type = other RNA
agaggtagtaggttgcatagtt

SEQ ID NO: 1903 - RNA, 20 nt, synthetic construct
  source 1..20: mol_type = other RNA
aaaagggggctgaggtggag

SEQ ID NO: 1904 - RNA, 20 nt, synthetic construct
  source 1..20: mol_type = other RNA
caaggaggagcggggattag

SEQ ID NO: 1905 - RNA, 22 nt, synthetic construct
  source 1..22: mol_type = other RNA
tgtaaacatccttgactggaag

SEQ ID NO: 1906 - RNA, 22 nt, synthetic construct
  source 1..22: mol_type = other RNA
cttggcacctagcaagcactca

SEQ ID NO: 1907 - RNA, 21 nt, synthetic construct
  source 1..21: mol_type = other RNA
agggtaagctgaacctctgat

SEQ ID NO: 1908 - RNA, 23 nt, synthetic construct
  source 1..23: mol_type = other RNA
actgccctaagtgctccttctgg

SEQ ID NO: 1909 - RNA, 22 nt, synthetic construct
  source 1..22: mol_type = other RNA
aaccactttctttgctcatcca

SEQ ID NO: 1910 - RNA, 19 nt, synthetic construct
  source 1..19: mol_type = other RNA
actggacttggaggcagaa

SEQ ID NO: 1911 - RNA, 23 nt, synthetic construct
  source 1..23: mol_type = other RNA
taaagactgtagaggcaactggt

SEQ ID NO: 1912 - RNA, 22 nt, synthetic construct
  source 1..22: mol_type = other RNA
atcatatgaaccaaactctaat

SEQ ID NO: 1913 - RNA, 22 nt, synthetic construct
  source 1..22: mol_type = other RNA
ttgaggaaaagatggtcttatt

SEQ ID NO: 1914 - RNA, 23 nt, synthetic construct
  source 1..23: mol_type = other RNA
tgacacggagggtggcttgggaa

SEQ ID NO: 1915 - RNA, 22 nt, synthetic construct
  source 1..22: mol_type = other RNA
agatcgaccgtgttatattcgc

SEQ ID NO: 1916 - RNA, 22 nt, synthetic construct
  source 1..22: mol_type = other RNA
tgtgacttctcccctgccacag

SEQ ID NO: 1917 - RNA, 22 nt, synthetic construct
  source 1..22: mol_type = other RNA
ttaggccatcatcccattatgc

SEQ ID NO: 1918 - RNA, 22 nt, synthetic construct
  source 1..22: mol_type = other RNA
tgagccgagctgagcttagctg

SEQ ID NO: 1919 - RNA, 22 nt, synthetic construct
  source 1..22: mol_type = other RNA
tggggatttggagaagtggtga

SEQ ID NO: 1920 - RNA, 21 nt, synthetic construct
  source 1..21: mol_type = other RNA
ttagcggtggaccgccctgcg

SEQ ID NO: 1921 - RNA, 22 nt, synthetic construct
  source 1..22: mol_type = other RNA
actggcatgctgcatttatata

SEQ ID NO: 1922 - RNA, 23 nt, synthetic construct
  source 1..23: mol_type = other RNA
tggcccggcgacgtctcacggtc

SEQ ID NO: 1923 - RNA, 21 nt, synthetic construct
  source 1..21: mol_type = other RNA
agaccctgcagccttcccacc

SEQ ID NO: 1924 - RNA, 22 nt, synthetic construct
  source 1..22: mol_type = other RNA
cgggcatgctgggagagacttt

SEQ ID NO: 1925 - RNA, 22 nt, synthetic construct
  source 1..22: mol_type = other RNA
tggtgggccgcagaacatgtgc

SEQ ID NO: 1926 - RNA, 22 nt, synthetic construct
  source 1..22: mol_type = other RNA
cgctggcagtgttggtgacact

SEQ ID NO: 1927 - RNA, 22 nt, synthetic construct
  source 1..22: mol_type = other RNA
caagctcgcttctatgggtctg

SEQ ID NO: 1928 - RNA, 19 nt, synthetic construct
  source 1..19: mol_type = other RNA
agctgtctgaaaatgtctt

SEQ ID NO: 1929 - RNA, 21 nt, synthetic construct
  source 1..21: mol_type = other RNA
gcccggagagctgggagccag

SEQ ID NO: 1930 - RNA, 21 nt, synthetic construct
  source 1..21: mol_type = other RNA
actctttccctgttgcactac

SEQ ID NO: 1931 - RNA, 22 nt, synthetic construct
  source 1..22: mol_type = other RNA
gtggttatccctgctgtgttcg

SEQ ID NO: 1932 - RNA, 23 nt, synthetic construct
  source 1..23: mol_type = other RNA
tgccctgcatggtgtccccacag

SEQ ID NO: 1933 - RNA, 23 nt, synthetic construct
  source 1..23: mol_type = other RNA
ttgccacactgcaacaccttaca

SEQ ID NO: 1934 - RNA, 20 nt, synthetic construct
  source 1..20: mol_type = other RNA
ctcgccctgtctcccgctag

SEQ ID NO: 1935 - RNA, 21 nt, synthetic construct
  source 1..21: mol_type = other RNA
tggcagttacttttgcaccag

SEQ ID NO: 1936 - RNA, 24 nt, synthetic construct
  source 1..24: mol_type = other RNA
tggggagctgaggctctgggggtg

SEQ ID NO: 1937 - RNA, 22 nt, synthetic construct
  source 1..22: mol_type = other RNA
agaggctggccgtgatgaattc

SEQ ID NO: 1938 - RNA, 17 nt, synthetic construct
  source 1..17: mol_type = other RNA
cctgagaaaagggccaa

SEQ ID NO: 1939 - RNA, 19 nt, synthetic construct
  source 1..19: mol_type = other RNA
ttcacagtggctaagctat

SEQ ID NO: 1940 - RNA, 21 nt, synthetic construct
  source 1..21: mol_type = other RNA
ctgaactagagattgggccca

SEQ ID NO: 1941 - RNA, 20 nt, synthetic construct
  source 1..20: mol_type = other RNA
aaatgggtggtctgaggcaa

SEQ ID NO: 1942 - RNA, 21 nt, synthetic construct
  source 1..21: mol_type = other RNA
ccgccttctctcctcccccag

SEQ ID NO: 1943 - RNA, 22 nt, synthetic construct
  source 1..22: mol_type = other RNA
ggatatcatcatatactgtaag

SEQ ID NO: 1944 - RNA, 22 nt, synthetic construct
  source 1..22: mol_type = other RNA
tggagtgtgacaatggtgtttg

SEQ ID NO: 1945 - RNA, 22 nt, synthetic construct
  source 1..22: mol_type = other RNA
tgcaaaagtaatcacagttttt

SEQ ID NO: 1946 - RNA, 22 nt, synthetic construct
  source 1..22: mol_type = other RNA
tggaatgtaaggaagtgtgtgg

SEQ ID NO: 1947 - RNA, 23 nt, synthetic construct
  source 1..23: mol_type = other RNA
actccatttgttttgatgatgga

SEQ ID NO: 1948 - RNA, 22 nt, synthetic construct
  source 1..22: mol_type = other RNA
aagttggctgcagttaaggtgg

SEQ ID NO: 1949 - RNA, 23 nt, synthetic construct
  source 1..23: mol_type = other RNA
tcccctgctcccttgttccccag

SEQ ID NO: 1950 - RNA, 20 nt, synthetic construct
  source 1..20: mol_type = other RNA
ggcggcggggaggtaggcag

SEQ ID NO: 1951 - RNA, 18 nt, synthetic construct
  source 1..18: mol_type = other RNA
cagtgcaatgttttcctt

SEQ ID NO: 1952 - RNA, 21 nt, synthetic construct
  source 1..21: mol_type = other RNA
atccagttctctgagggggct

SEQ ID NO: 1953 - RNA, 20 nt, synthetic construct
  source 1..20: mol_type = other RNA
tttggagaggtgtactccca

SEQ ID NO: 1954 - RNA, 22 nt, synthetic construct
  source 1..22: mol_type = other RNA
tgtgatatcgtgcttcctggga

SEQ ID NO: 1955 - RNA, 22 nt, synthetic construct
  source 1..22: mol_type = other RNA
tcaggccaggcacagtggctca

SEQ ID NO: 1956 - RNA, 22 nt, synthetic construct
  source 1..22: mol_type = other RNA
ttataaagcaatgagactgatt

SEQ ID NO: 1957 - RNA, 21 nt, synthetic construct
  source 1..21: mol_type = other RNA
cctgtctgtgcctgctgtaca

SEQ ID NO: 1958 - RNA, 22 nt, synthetic construct
  source 1..22: mol_type = other RNA
gtcatacacggctctcctctct

SEQ ID NO: 1959 - RNA, 19 nt, synthetic construct
  source 1..19: mol_type = other RNA
gtgtctgcttcctgtggga

SEQ ID NO: 1960 - RNA, 22 nt, synthetic construct
  source 1..22: mol_type = other RNA
cattgcacttgtctcggtctga

SEQ ID NO: 1961 - RNA, 22 nt, synthetic construct
  source 1..22: mol_type = other RNA
tgttgcaagtcggtggagacgt

SEQ ID NO: 1962 - RNA, 23 nt, synthetic construct
  source 1..23: mol_type = other RNA
ttgggatggtaggaccagagggg

SEQ ID NO: 1963 - RNA, 22 nt, synthetic construct
  source 1..22: mol_type = other RNA
tggaaacatttctgcacaaact

SEQ ID NO: 1964 - RNA, 19 nt, synthetic construct
  source 1..19: mol_type = other RNA
gcattgtgcagggctatca

SEQ ID NO: 1965 - RNA, 22 nt, synthetic construct
  source 1..22: mol_type = other RNA
tatggaaagactttgccactct

SEQ ID NO: 1966 - RNA, 23 nt, synthetic construct
  source 1..23: mol_type = other RNA
aggaggtggtactaggggccagc

SEQ ID NO: 1967 - RNA, 21 nt, synthetic construct
  source 1..21: mol_type = other RNA
gcagtccatgggcatatacac

SEQ ID NO: 1968 - RNA, 23 nt, synthetic construct
  source 1..23: mol_type = other RNA
aatgacacgatcactcccgttga

SEQ ID NO: 1969 - RNA, 22 nt, synthetic construct
  source 1..22: mol_type = other RNA
aacattcaacctgtcggtgagt

SEQ ID NO: 1970 - RNA, 22 nt, synthetic construct
  source 1..22: mol_type = other RNA
aggcgatgtggggatgtagaga

SEQ ID NO: 1971 - RNA, 22 nt, synthetic construct
  source 1..22: mol_type = other RNA
acagcccagcagttatcacggg

SEQ ID NO: 1972 - RNA, 21 nt, synthetic construct
  source 1..21: mol_type = other RNA
aatgtagagattgatcaaaat

SEQ ID NO: 1973 - RNA, 22 nt, synthetic construct
  source 1..22: mol_type = other RNA
tccagcatcagtgattttgttg

SEQ ID NO: 1974 - RNA, 21 nt, synthetic construct
  source 1..21: mol_type = other RNA
acagacttgctgtgatgttca

SEQ ID NO: 1975 - RNA, 22 nt, synthetic construct
  source 1..22: mol_type = other RNA
tcatttttgtgatgttgcagct

SEQ ID NO: 1976 - RNA, 22 nt, synthetic construct
  source 1..22: mol_type = other RNA
tgtagttgtattgtattgccac

SEQ ID NO: 1977 - RNA, 22 nt, synthetic construct
  source 1..22: mol_type = other RNA
ttccctttgtcatccttcgcct

SEQ ID NO: 1978 - RNA, 22 nt, synthetic construct
  source 1..22: mol_type = other RNA
tgcaccatggttgtctgagcat

SEQ ID NO: 1979 - RNA, 22 nt, synthetic construct
  source 1..22: mol_type = other RNA
tcggttatcatggtaccgatgc

SEQ ID NO: 1980 - RNA, 21 nt, synthetic construct
  source 1..21: mol_type = other RNA
tgattgtccaaacgcaattct

SEQ ID NO: 1981 - RNA, 22 nt, synthetic construct
  source 1..22: mol_type = other RNA
agagttgagtctggacgtcccg

SEQ ID NO: 1982 - RNA, 22 nt, synthetic construct
  source 1..22: mol_type = other RNA
gtccacttctgcctgccctgcc

SEQ ID NO: 1983 - RNA, 21 nt, synthetic construct
  source 1..21: mol_type = other RNA
gttggggtgcaggggtctgct

SEQ ID NO: 1984 - RNA, 22 nt, synthetic construct
  source 1..22: mol_type = other RNA
tcctttgcctattctatttaag

SEQ ID NO: 1985 - RNA, 21 nt, synthetic construct
  source 1..21: mol_type = other RNA
gaccgagagggcctcggctgt

SEQ ID NO: 1986 - RNA, 21 nt, synthetic construct
  source 1..21: mol_type = other RNA
taccacagggtagaaccacgg

SEQ ID NO: 1987 - RNA, 21 nt, synthetic construct
  source 1..21: mol_type = other RNA
tgagtgttgtctacgagggca

SEQ ID NO: 1988 - RNA, 22 nt, synthetic construct
  source 1..22: mol_type = other RNA
cttccccccagtaatcttcatc

SEQ ID NO: 1989 - RNA, 22 nt, synthetic construct
  source 1..22: mol_type = other RNA
gctgacagcagggctggccgct

SEQ ID NO: 1990 - RNA, 21 nt, synthetic construct
  source 1..21: mol_type = other RNA
gtttggacatagtgtggctgg

SEQ ID NO: 1991 - RNA, 19 nt, synthetic construct
  source 1..19: mol_type = other RNA
tgaggtggtaggatgtaga

SEQ ID NO: 1992 - RNA, 21 nt, synthetic construct
  source 1..21: mol_type = other RNA
agggggaaagttctatagtcc

SEQ ID NO: 1993 - RNA, 21 nt, synthetic construct
  source 1..21: mol_type = other RNA
aataatacatggttgatcttt

SEQ ID NO: 1994 - RNA, 22 nt, synthetic construct
  source 1..22: mol_type = other RNA
ctctagccacagatgcagtgat

SEQ ID NO: 1995 - RNA, 22 nt, synthetic construct
  source 1..22: mol_type = other RNA
taacagtctacagccatggtcg

SEQ ID NO: 1996 - RNA, 22 nt, synthetic construct
  source 1..22: mol_type = other RNA
agctgtaattagtcagttttct

SEQ ID NO: 1997 - RNA, 22 nt, synthetic construct
  source 1..22: mol_type = other RNA
tacaagtcaggagctgaagcag

SEQ ID NO: 1998 - RNA, 21 nt, synthetic construct
  source 1..21: mol_type = other RNA
tgactgcctcactgaccactt

SEQ ID NO: 1999 - RNA, 23 nt, synthetic construct
  source 1..23: mol_type = other RNA
atcgctgcggttgcgagcgctgt

SEQ ID NO: 2000 - RNA, 23 nt, synthetic construct
  source 1..23: mol_type = other RNA
agggtggggctggaggtggggct

SEQ ID NO: 2001 - RNA, 21 nt, synthetic construct
  source 1..21: mol_type = other RNA
ccggccgccggctccgccccg

SEQ ID NO: 2002 - RNA, 21 nt, synthetic construct
  source 1..21: mol_type = other RNA
agcctgtgcttgtccctgcag

SEQ ID NO: 2003 - RNA, 21 nt, synthetic construct
  source 1..21: mol_type = other RNA
ctgcctgttcttccactccag

SEQ ID NO: 2004 - RNA, 24 nt, synthetic construct
  source 1..24: mol_type = other RNA
cttctgcctgcattctactcccag

SEQ ID NO: 2005 - RNA, 22 nt, synthetic construct
  source 1..22: mol_type = other RNA
aaaagtaatcgcggtttttgtc

SEQ ID NO: 2006 - RNA, 21 nt, synthetic construct
  source 1..21: mol_type = other RNA
gaagtgtgccgtggtgtgtct

SEQ ID NO: 2007 - RNA, 21 nt, synthetic construct
  source 1..21: mol_type = other RNA
tcccacgttgtggcccagcag

SEQ ID NO: 2008 - RNA, 22 nt, synthetic construct
  source 1..22: mol_type = other RNA
cagtgcaatgttaaaagggcat

SEQ ID NO: 2009 - RNA, 19 nt, synthetic construct
  source 1..19: mol_type = other RNA
aggcaggttatctgggctg

SEQ ID NO: 2010 - RNA, 21 nt, synthetic construct
  source 1..21: mol_type = other RNA
tcccttcttcctgggccctca

SEQ ID NO: 2011 - RNA, 22 nt, synthetic construct
  source 1..22: mol_type = other RNA
tgaggacagggcaaattcacga

SEQ ID NO: 2012 - RNA, 23 nt, synthetic construct
  source 1..23: mol_type = other RNA
tgtagtgtttcctactttatgga

SEQ ID NO: 2013 - RNA, 21 nt, synthetic construct
  source 1..21: mol_type = other RNA
ttagtctcatgatcagacaca

SEQ ID NO: 2014 - RNA, 20 nt, synthetic construct
  source 1..20: mol_type = other RNA
ctacaaagggaagccctttc

SEQ ID NO: 2015 - RNA, 20 nt, synthetic construct
  source 1..20: mol_type = other RNA
tctgcagggtttgctttgag

SEQ ID NO: 2016 - RNA, 22 nt, synthetic construct
  source 1..22: mol_type = other RNA
aaaaccgtctagttacagttgt

SEQ ID NO: 2017 - RNA, 22 nt, synthetic construct
  source 1..22: mol_type = other RNA
tacttacctgtcccctacccca

SEQ ID NO: 2018 - RNA, 22 nt, synthetic construct
  source 1..22: mol_type = other RNA
tgggatgagggattgaagtgga

SEQ ID NO: 2019 - RNA, 22 nt, synthetic construct
  source 1..22: mol_type = other RNA
caaggagacgggaacatggagc

SEQ ID NO: 2020 - RNA, 21 nt, synthetic construct
  source 1..21: mol_type = other RNA
attgtccctctcccttcccag

SEQ ID NO: 2021 - RNA, 22 nt, synthetic construct
  source 1..22: mol_type = other RNA
aggtagactgggatttgttgtt

SEQ ID NO: 2022 - RNA, 21 nt, synthetic construct
  source 1..21: mol_type = other RNA
cttctcttctctccttcccag

SEQ ID NO: 2023 - RNA, 22 nt, synthetic construct
  source 1..22: mol_type = other RNA
acatacttctttatatgcccat

SEQ ID NO: 2024 - RNA, 21 nt, synthetic construct
  source 1..21: mol_type = other RNA
ttcacagtggctaagttccgc

SEQ ID NO: 2025 - RNA, 23 nt, synthetic construct
  source 1..23: mol_type = other RNA
aggaagccctggaggggctggag

SEQ ID NO: 2026 - RNA, 22 nt, synthetic construct
  source 1..22: mol_type = other RNA
tagagtctggctgatatggttt

SEQ ID NO: 2027 - RNA, 21 nt, synthetic construct
  source 1..21: mol_type = other RNA
gatctcactttgttgcccagg

SEQ ID NO: 2028 - RNA, 21 nt, synthetic construct
  source 1..21: mol_type = other RNA
gcagagaacaaaggactcagt

SEQ ID NO: 2029 - RNA, 22 nt, synthetic construct
  source 1..22: mol_type = other RNA
ggggaactgtagatgaaaaggc

SEQ ID NO: 2030 - RNA, 22 nt, synthetic construct
  source 1..22: mol_type = other RNA
ggagaaattatccttggtgtgt

SEQ ID NO: 2031 - RNA, 22 nt, synthetic construct
  source 1..22: mol_type = other RNA
actttcctcactcccgtgaagt

SEQ ID NO: 2032 - RNA, 20 nt, synthetic construct
  source 1..20: mol_type = other RNA
gtgcattgctgttgcattgc

SEQ ID NO: 2033 - RNA, 20 nt, synthetic construct
  source 1..20: mol_type = other RNA
acccgcccgtctccccacag

SEQ ID NO: 2034 - RNA, 26 nt, synthetic construct
  source 1..26: mol_type = other RNA
aagaggaagaaatggctggttctcag

SEQ ID NO: 2035 - RNA, 17 nt, synthetic construct
  source 1..17: mol_type = other RNA
ccaattaccacttcttt

SEQ ID NO: 2036 - RNA, 23 nt, synthetic construct
  source 1..23: mol_type = other RNA
gggcctctcttgtcatcctgcag

SEQ ID NO: 2037 - RNA, 19 nt, synthetic construct
  source 1..19: mol_type = other RNA
agggacctgagtgtctaag

SEQ ID NO: 2038 - RNA, 22 nt, synthetic construct
  source 1..22: mol_type = other RNA
ctggggttctgagacagacagt

SEQ ID NO: 2039 - RNA, 20 nt, synthetic construct
  source 1..20: mol_type = other RNA
tccccttcctccctgcccag

SEQ ID NO: 2040 - RNA, 23 nt, synthetic construct
  source 1..23: mol_type = other RNA
atgcggacctgggttagcggagt

SEQ ID NO: 2041 - RNA, 22 nt, synthetic construct
  source 1..22: mol_type = other RNA
cagagtgacaagctggttaaag

SEQ ID NO: 2042 - RNA, 20 nt, synthetic construct
  source 1..20: mol_type = other RNA
ccatggatctccaggtgggt

SEQ ID NO: 2043 - RNA, 23 nt, synthetic construct
  source 1..23: mol_type = other RNA
aggcagtgtagttagctgattgc

SEQ ID NO: 2044 - RNA, 22 nt, synthetic construct
  source 1..22: mol_type = other RNA
aaaatggttccctttagagtgt

SEQ ID NO: 2045 - RNA, 17 nt, synthetic construct
  source 1..17: mol_type = other RNA
tggagagaaaggcagta

SEQ ID NO: 2046 - RNA, 22 nt, synthetic construct
  source 1..22: mol_type = other RNA
tgtgatatcatggttcctggga

SEQ ID NO: 2047 - RNA, 22 nt, synthetic construct
  source 1..22: mol_type = other RNA
aggactggactcccggcagccc

SEQ ID NO: 2048 - RNA, 23 nt, synthetic construct
  source 1..23: mol_type = other RNA
gaagtgcttcgattttggggtgt

SEQ ID NO: 2049 - RNA, 22 nt, synthetic construct
  source 1..22: mol_type = other RNA
agggactttcaggggcagctgt

SEQ ID NO: 2050 - RNA, 23 nt, synthetic construct
  source 1..23: mol_type = other RNA
tacatggatggaaaccttcaagc

SEQ ID NO: 2051 - RNA, 21 nt, synthetic construct
  source 1..21: mol_type = other RNA
taaaaactgcaattactttta

SEQ ID NO: 2052 - RNA, 22 nt, synthetic construct
  source 1..22: mol_type = other RNA
tggagagaaaggcagttcctga

SEQ ID NO: 2053 - RNA, 24 nt, synthetic construct
  source 1..24: mol_type = other RNA
agctgtctgtgttttccttctcag

SEQ ID NO: 2054 - RNA, 23 nt, synthetic construct
  source 1..23: mol_type = other RNA
atcagggcttgtggaatgggaag

SEQ ID NO: 2055 - RNA, 21 nt, synthetic construct
  source 1..21: mol_type = other RNA
gggactaggatgcagacctcc

SEQ ID NO: 2056 - RNA, 25 nt, synthetic construct
  source 1..25: mol_type = other RNA
cttccagacgctccgccccacgtcg

SEQ ID NO: 2057 - RNA, 22 nt, synthetic construct
  source 1..22: mol_type = other RNA
tgggggagtgcagtgattgtgg

SEQ ID NO: 2058 - RNA, 22 nt, synthetic construct
  source 1..22: mol_type = other RNA
attaaggacatttgtgattgat

SEQ ID NO: 2059 - RNA, 20 nt, synthetic construct
  source 1..20: mol_type = other RNA
aaaagtgattgcagtgtttg

SEQ ID NO: 2060 - RNA, 21 nt, synthetic construct
  source 1..21: mol_type = other RNA
tactcaaaaagctgtcagtca

SEQ ID NO: 2061 - RNA, 21 nt, synthetic construct
  source 1..21: mol_type = other RNA
caacaaatcccagtctaccta

SEQ ID NO: 2062 - RNA, 22 nt, synthetic construct
  source 1..22: mol_type = other RNA
tttggacagaaaacacgcaggt

SEQ ID NO: 2063 - RNA, 17 nt, synthetic construct
  source 1..17: mol_type = other RNA
cagagaattgtttaatc

SEQ ID NO: 2064 - RNA, 23 nt, synthetic construct
  source 1..23: mol_type = other RNA
atactgtgaatttcactgtcaca

SEQ ID NO: 2065 - RNA, 21 nt, synthetic construct
  source 1..21: mol_type = other RNA
gggaagagctgtacggccttc

SEQ ID NO: 2066 - RNA, 23 nt, synthetic construct
  source 1..23: mol_type = other RNA
cactgcattcctgcttggcccag

SEQ ID NO: 2067 - RNA, 17 nt, synthetic construct
  source 1..17: mol_type = other RNA
tggggctcagcgagttt

SEQ ID NO: 2068 - RNA, 21 nt, synthetic construct
  source 1..21: mol_type = other RNA
tgacaactatggatgagctct

SEQ ID NO: 2069 - RNA, 21 nt, synthetic construct
  source 1..21: mol_type = other RNA
ctgccacgagcgtgcgggcct

SEQ ID NO: 2070 - RNA, 23 nt, synthetic construct
  source 1..23: mol_type = other RNA
gcagcagagaataggactacgtc

SEQ ID NO: 2071 - RNA, 21 nt, synthetic construct
  source 1..21: mol_type = other RNA
cacacatagcaggtgtatata

SEQ ID NO: 2072 - RNA, 21 nt, synthetic construct
  source 1..21: mol_type = other RNA
catggggtagggcagagtagg

SEQ ID NO: 2073 - RNA, 18 nt, synthetic construct
  source 1..18: mol_type = other RNA
gggctcacatcaccccat

SEQ ID NO: 2074 - RNA, 22 nt, synthetic construct
  source 1..22: mol_type = other RNA
cttagactgccagactccctga

SEQ ID NO: 2075 - RNA, 18 nt, synthetic construct
  source 1..18: mol_type = other RNA
ttcacagggaggtgtcat

SEQ ID NO: 2076 - RNA, 22 nt, synthetic construct
  source 1..22: mol_type = other RNA
tggcgggggtagagctggctgc

SEQ ID NO: 2077 - RNA, 22 nt, synthetic construct
  source 1..22: mol_type = other RNA
aaagacccattgaggagaaggt

SEQ ID NO: 2078 - RNA, 22 nt, synthetic construct
  source 1..22: mol_type = other RNA
ttttgcgatgtgttcctaatat

SEQ ID NO: 2079 - RNA, 23 nt, synthetic construct
  source 1..23: mol_type = other RNA
tgtgactgcattatgaaaattct

SEQ ID NO: 2080 - RNA, 21 nt, synthetic construct
  source 1..21: mol_type = other RNA
agcatgacagaggagaggtgg

SEQ ID NO: 2081 - RNA, 19 nt, synthetic construct
  source 1..19: mol_type = other RNA
tggatttttggatcaggga

SEQ ID NO: 2082 - RNA, 22 nt, synthetic construct
  source 1..22: mol_type = other RNA
tataaaatgagggcagtaagac

SEQ ID NO: 2083 - RNA, 23 nt, synthetic construct
  source 1..23: mol_type = other RNA
ttcatgaactgggtctagcttgg

SEQ ID NO: 2084 - RNA, 22 nt, synthetic construct
  source 1..22: mol_type = other RNA
aggcggggcgccgcgggaccgc

SEQ ID NO: 2085 - RNA, 22 nt, synthetic construct
  source 1..22: mol_type = other RNA
gtaggggaggttgggccaggga

SEQ ID NO: 2086 - RNA, 23 nt, synthetic construct
  source 1..23: mol_type = other RNA
tctttggttatctagctgtatga

SEQ ID NO: 2087 - RNA, 19 nt, synthetic construct
  source 1..19: mol_type = other RNA
aaaaactgtaattactttt

SEQ ID NO: 2088 - RNA, 25 nt, synthetic construct
  source 1..25: mol_type = other RNA
actggacttggagtcagaagagtgg

SEQ ID NO: 2089 - RNA, 22 nt, synthetic construct
  source 1..22: mol_type = other RNA
tcacagtggtctctgggattat

SEQ ID NO: 2090 - RNA, 22 nt, synthetic construct
  source 1..22: mol_type = other RNA
cactgtttcctttctgagtgga

SEQ ID NO: 2091 - RNA, 24 nt, synthetic construct
  source 1..24: mol_type = other RNA
taggtagagtgtgaggaggaggtc

SEQ ID NO: 2092 - RNA, 24 nt, synthetic construct
  source 1..24: mol_type = other RNA
tccctgagaccctttaacctgtga

SEQ ID NO: 2093 - RNA, 19 nt, synthetic construct
  source 1..19: mol_type = other RNA
actggacttggagtcagga

SEQ ID NO: 2094 - RNA, 22 nt, synthetic construct
  source 1..22: mol_type = other RNA
aaagacatagttgcaagatggg

SEQ ID NO: 2095 - RNA, 24 nt, synthetic construct
  source 1..24: mol_type = other RNA
gaaaatgatgagtagtgactgatg

SEQ ID NO: 2096 - RNA, 19 nt, synthetic construct
  source 1..19: mol_type = other RNA
aggctgcggaattcaggac

SEQ ID NO: 2097 - RNA, 18 nt, synthetic construct
  source 1..18: mol_type = other RNA
ctagggggtttgcccttg

SEQ ID NO: 2098 - RNA, 22 nt, synthetic construct
  source 1..22: mol_type = other RNA
agcttttgggaattcaggtagt

SEQ ID NO: 2099 - RNA, 20 nt, synthetic construct
  source 1..20: mol_type = other RNA
ctcactgatcaatgaatgca

SEQ ID NO: 2100 - RNA, 21 nt, synthetic construct
  source 1..21: mol_type = other RNA
ttagtcctgcctgtaggttta

SEQ ID NO: 2101 - RNA, 19 nt, synthetic construct
  source 1..19: mol_type = other RNA
tgagggagtggattgtatg

SEQ ID NO: 2102 - RNA, 22 nt, synthetic construct
  source 1..22: mol_type = other RNA
aggtgctccaggctggctcaca

SEQ ID NO: 2103 - RNA, 22 nt, synthetic construct
  source 1..22: mol_type = other RNA
tgaaggtctactgtgtgccagg

SEQ ID NO: 2104 - RNA, 22 nt, synthetic construct
  source 1..22: mol_type = other RNA
tcctaaatctgaaagtccaaaa

SEQ ID NO: 2105 - RNA, 17 nt, synthetic construct
  source 1..17: mol_type = other RNA
cctggtggcttcctttt

SEQ ID NO: 2106 - RNA, 22 nt, synthetic construct
  source 1..22: mol_type = other RNA
aacccgtagatccgatcttgtg

SEQ ID NO: 2107 - RNA, 23 nt, synthetic construct
  source 1..23: mol_type = other RNA
tggccggatgggacaggaggcat

SEQ ID NO: 2108 - RNA, 22 nt, synthetic construct
  source 1..22: mol_type = other RNA
taggtagtttcatgttgttggg

SEQ ID NO: 2109 - RNA, 22 nt, synthetic construct
  source 1..22: mol_type = other RNA
ccctctctggctcctccccaaa

SEQ ID NO: 2110 - RNA, 19 nt, synthetic construct
  source 1..19: mol_type = other RNA
ctggggagtggctggggag

SEQ ID NO: 2111 - RNA, 22 nt, synthetic construct
  source 1..22: mol_type = other RNA
tggcaaggaaagaagaggatca

SEQ ID NO: 2112 - RNA, 21 nt, synthetic construct
  source 1..21: mol_type = other RNA
tacttggaaaggcatcagttg

SEQ ID NO: 2113 - RNA, 21 nt, synthetic construct
  source 1..21: mol_type = other RNA
tccctccttctgtccccacag

SEQ ID NO: 2114 - RNA, 22 nt, synthetic construct
  source 1..22: mol_type = other RNA
acccgtcccgttcgtccccgga

SEQ ID NO: 2115 - RNA, 22 nt, synthetic construct
  source 1..22: mol_type = other RNA
taccattagaagagctggaaga

SEQ ID NO: 2116 - RNA, 24 nt, synthetic construct
  source 1..24: mol_type = other RNA
acaaaaaaaaaagcccaacccttc

SEQ ID NO: 2117 - RNA, 22 nt, synthetic construct
  source 1..22: mol_type = other RNA
aaaagtaattgcgagttttacc

SEQ ID NO: 2118 - RNA, 22 nt, synthetic construct
  source 1..22: mol_type = other RNA
gaaagtgcttccttttagaggc

SEQ ID NO: 2119 - RNA, 21 nt, synthetic construct
  source 1..21: mol_type = other RNA
ggacccacccggccgggaata

SEQ ID NO: 2120 - RNA, 22 nt, synthetic construct
  source 1..22: mol_type = other RNA
tgtgtccgggaagtggaggagg

SEQ ID NO: 2121 - RNA, 21 nt, synthetic construct
  source 1..21: mol_type = other RNA
cagcagcacactgtggtttgt

SEQ ID NO: 2122 - RNA, 17 nt, synthetic construct
  source 1..17: mol_type = other RNA
gaagatggacgtacttt

SEQ ID NO: 2123 - RNA, 24 nt, synthetic construct
  source 1..24: mol_type = other RNA
tatagagagcaggaagattaatgt

SEQ ID NO: 2124 - RNA, 18 nt, synthetic construct
  source 1..18: mol_type = other RNA
cggggcggcaggggcctc

SEQ ID NO: 2125 - RNA, 24 nt, synthetic construct
  source 1..24: mol_type = other RNA
acccccgggcaaagacctgcagat

SEQ ID NO: 2126 - RNA, 23 nt, synthetic construct
  source 1..23: mol_type = other RNA
tcggggagtctggggtccggaat

SEQ ID NO: 2127 - RNA, 22 nt, synthetic construct
  source 1..22: mol_type = other RNA
agacacatttggagagggaccc

SEQ ID NO: 2128 - RNA, 22 nt, synthetic construct
  source 1..22: mol_type = other RNA
aattgcacggtatccatctgta

SEQ ID NO: 2129 - RNA, 22 nt, synthetic construct
  source 1..22: mol_type = other RNA
tcaccctgcatcccgcacccag

SEQ ID NO: 2130 - RNA, 19 nt, synthetic construct
  source 1..19: mol_type = other RNA
ctgtgggctcagctctggg

SEQ ID NO: 2131 - RNA, 22 nt, synthetic construct
  source 1..22: mol_type = other RNA
cagaaggggagttgggagcaga

SEQ ID NO: 2132 - RNA, 22 nt, synthetic construct
  source 1..22: mol_type = other RNA
gtgagtagtggcgcgcggcggc

SEQ ID NO: 2133 - RNA, 22 nt, synthetic construct
  source 1..22: mol_type = other RNA
gccttctcttcccggttcttcc

SEQ ID NO: 2134 - RNA, 26 nt, synthetic construct
  source 1..26: mol_type = other RNA
cccagggcttggagtggggcaaggtt

SEQ ID NO: 2135 - RNA, 22 nt, synthetic construct
  source 1..22: mol_type = other RNA
ttggacagaaaacacgcaggaa

SEQ ID NO: 2136 - RNA, 22 nt, synthetic construct
  source 1..22: mol_type = other RNA
tgttcattggaaccctgcgcag

SEQ ID NO: 2137 - RNA, 24 nt, synthetic construct
  source 1..24: mol_type = other RNA
gtggaaagcatgcatccagggtgt

SEQ ID NO: 2138 - RNA, 24 nt, synthetic construct
  source 1..24: mol_type = other RNA
tacagatgcagattctctgacttc

SEQ ID NO: 2139 - RNA, 22 nt, synthetic construct
  source 1..22: mol_type = other RNA
ttgtacatggtaggctttcatt

SEQ ID NO: 2140 - RNA, 22 nt, synthetic construct
  source 1..22: mol_type = other RNA
ggggctgtgattgaccagcagg

SEQ ID NO: 2141 - RNA, 21 nt, synthetic construct
  source 1..21: mol_type = other RNA
tgggtttacgttgggagaact

SEQ ID NO: 2142 - RNA, 23 nt, synthetic construct
  source 1..23: mol_type = other RNA
caaccaccactgtctctccccag

SEQ ID NO: 2143 - RNA, 22 nt, synthetic construct
  source 1..22: mol_type = other RNA
agttgcctttttgttcccatgc

SEQ ID NO: 2144 - RNA, 24 nt, synthetic construct
  source 1..24: mol_type = other RNA
ttggactttttcagatttggggat

SEQ ID NO: 2145 - RNA, 21 nt, synthetic construct
  source 1..21: mol_type = other RNA
tcccttgtctcctttccctag

SEQ ID NO: 2146 - RNA, 22 nt, synthetic construct
  source 1..22: mol_type = other RNA
ataatacatggttaacctcttt

SEQ ID NO: 2147 - RNA, 23 nt, synthetic construct
  source 1..23: mol_type = other RNA
aacattcattgttgtcggtgggt

SEQ ID NO: 2148 - RNA, 17 nt, synthetic construct
  source 1..17: mol_type = other RNA
ttggaggcgtgggtttt

SEQ ID NO: 2149 - RNA, 22 nt, synthetic construct
  source 1..22: mol_type = other RNA
tcattatatgtatgatctggac

SEQ ID NO: 2150 - RNA, 21 nt, synthetic construct
  source 1..21: mol_type = other RNA
cctcccatgccaagaactccc

SEQ ID NO: 2151 - RNA, 20 nt, synthetic construct
  source 1..20: mol_type = other RNA
gaagtggagcacatcagtga

SEQ ID NO: 2152 - RNA, 21 nt, synthetic construct
  source 1..21: mol_type = other RNA
cagggccaggcacagagtaag

SEQ ID NO: 2153 - RNA, 22 nt, synthetic construct
  source 1..22: mol_type = other RNA
agttcttcagtggcaagcttta

SEQ ID NO: 2154 - RNA, 23 nt, synthetic construct
  source 1..23: mol_type = other RNA
tgtggaaggtagacggccagaga

SEQ ID NO: 2155 - RNA, 21 nt, synthetic construct
  source 1..21: mol_type = other RNA
caaaggtatttgtggtttttg

SEQ ID NO: 2156 - RNA, 22 nt, synthetic construct
  source 1..22: mol_type = other RNA
tgccctaaatgccccttctggc

SEQ ID NO: 2157 - RNA, 22 nt, synthetic construct
  source 1..22: mol_type = other RNA
aaggagctcacagtctattgag

SEQ ID NO: 2158 - RNA, 19 nt, synthetic construct
  source 1..19: mol_type = other RNA
ccggttccagtccctggag

SEQ ID NO: 2159 - RNA, 21 nt, synthetic construct
  source 1..21: mol_type = other RNA
cacattacacggtcgacctct

SEQ ID NO: 2160 - RNA, 22 nt, synthetic construct
  source 1..22: mol_type = other RNA
tgtttgttgtaaggatcgttgt

SEQ ID NO: 2161 - RNA, 22 nt, synthetic construct
  source 1..22: mol_type = other RNA
aaaggaggaaataggcaggcca

SEQ ID NO: 2162 - RNA, 23 nt, synthetic construct
  source 1..23: mol_type = other RNA
tcgcagacagggacacatggaga

SEQ ID NO: 2163 - RNA, 22 nt, synthetic construct
  source 1..22: mol_type = other RNA
actgggtaggtggggctccagg

SEQ ID NO: 2164 - RNA, 21 nt, synthetic construct
  source 1..21: mol_type = other RNA
cttagattagaggatattgtt

SEQ ID NO: 2165 - RNA, 22 nt, synthetic construct
  source 1..22: mol_type = other RNA
aaagtgcatctttttagaggat

SEQ ID NO: 2166 - RNA, 21 nt, synthetic construct
  source 1..21: mol_type = other RNA
acatcgccccaccttccccag

SEQ ID NO: 2167 - RNA, 21 nt, synthetic construct
  source 1..21: mol_type = other RNA
ctttttgcggtctgggcttgc

SEQ ID NO: 2168 - RNA, 22 nt, synthetic construct
  source 1..22: mol_type = other RNA
aataggccacggatctgggcaa

SEQ ID NO: 2169 - RNA, 22 nt, synthetic construct
  source 1..22: mol_type = other RNA
aatcccaatgctagacccggtg

SEQ ID NO: 2170 - RNA, 22 nt, synthetic construct
  source 1..22: mol_type = other RNA
ttatcctccagtagactaggga

SEQ ID NO: 2171 - RNA, 22 nt, synthetic construct
  source 1..22: mol_type = other RNA
tggcccaacctattcagttagt

SEQ ID NO: 2172 - RNA, 19 nt, synthetic construct
  source 1..19: mol_type = other RNA
tttctatgttagttggaag

SEQ ID NO: 2173 - RNA, 25 nt, synthetic construct
  source 1..25: mol_type = other RNA
ggcggagggaagtaggtccgttggt

SEQ ID NO: 2174 - RNA, 24 nt, synthetic construct
  source 1..24: mol_type = other RNA
tttggcaatggtagaactcacact

SEQ ID NO: 2175 - RNA, 21 nt, synthetic construct
  source 1..21: mol_type = other RNA
actggcattagtgggactttt

SEQ ID NO: 2176 - RNA, 21 nt, synthetic construct
  source 1..21: mol_type = other RNA
aaaagtaactgcggtttttga

SEQ ID NO: 2177 - RNA, 25 nt, synthetic construct
  source 1..25: mol_type = other RNA
ataacattgtaaagcgcttctttcg

SEQ ID NO: 2178 - RNA, 22 nt, synthetic construct
  source 1..22: mol_type = other RNA
cctgtgccttttacttctttaa

SEQ ID NO: 2179 - RNA, 22 nt, synthetic construct
  source 1..22: mol_type = other RNA
agaccctggtctgcactctatc

SEQ ID NO: 2180 - RNA, 22 nt, synthetic construct
  source 1..22: mol_type = other RNA
tatgtaacacggtccactaacc

SEQ ID NO: 2181 - RNA, 22 nt, synthetic construct
  source 1..22: mol_type = other RNA
gtgactgataccttggaggcat

SEQ ID NO: 2182 - RNA, 22 nt, synthetic construct
  source 1..22: mol_type = other RNA
atcctctcttccctcctcccag

SEQ ID NO: 2183 - RNA, 21 nt, synthetic construct
  source 1..21: mol_type = other RNA
attgacacttctgtgagtaga

SEQ ID NO: 2184 - RNA, 23 nt, synthetic construct
  source 1..23: mol_type = other RNA
ctcggggcaggcggctgggagcg

SEQ ID NO: 2185 - RNA, 21 nt, synthetic construct
  source 1..21: mol_type = other RNA
ttacacagctggacagaggca

SEQ ID NO: 2186 - RNA, 22 nt, synthetic construct
  source 1..22: mol_type = other RNA
ccaacctaggtggtcagagttg

SEQ ID NO: 2187 - RNA, 22 nt, synthetic construct
  source 1..22: mol_type = other RNA
ttctctttctttagccttgtgt

SEQ ID NO: 2188 - RNA, 18 nt, synthetic construct
  source 1..18: mol_type = other RNA
tccagtgccctcctctcc

SEQ ID NO: 2189 - RNA, 22 nt, synthetic construct
  source 1..22: mol_type = other RNA
aagagaactgaaagtggagcct

SEQ ID NO: 2190 - RNA, 22 nt, synthetic construct
  source 1..22: mol_type = other RNA
accgtggctttcgattgttact

SEQ ID NO: 2191 - RNA, 21 nt, synthetic construct
  source 1..21: mol_type = other RNA
attaggtagtggcagtggaac

SEQ ID NO: 2192 - RNA, 22 nt, synthetic construct
  source 1..22: mol_type = other RNA
agaagattgcagagtaagttcc

SEQ ID NO: 2193 - RNA, 20 nt, synthetic construct
  source 1..20: mol_type = other RNA
gggctggggcgcggggaggt

SEQ ID NO: 2194 - RNA, 22 nt, synthetic construct
  source 1..22: mol_type = other RNA
cgcaggggccgggtgctcaccg

SEQ ID NO: 2195 - RNA, 21 nt, synthetic construct
  source 1..21: mol_type = other RNA
gtgtgcggaaatgcttctgct

SEQ ID NO: 2196 - RNA, 23 nt, synthetic construct
  source 1..23: mol_type = other RNA
tgtaaacatcctacactctcagc

SEQ ID NO: 2197 - RNA, 22 nt, synthetic construct
  source 1..22: mol_type = other RNA
tatgtgcctttggactacatcg

SEQ ID NO: 2198 - RNA, 21 nt, synthetic construct
  source 1..21: mol_type = other RNA
gagggcatgcgcactttgtcc

SEQ ID NO: 2199 - RNA, 22 nt, synthetic construct
  source 1..22: mol_type = other RNA
ctgaatagctgggactacaggt

SEQ ID NO: 2200 - RNA, 22 nt, synthetic construct
  source 1..22: mol_type = other RNA
aaattcatgttcaatctaaacc

SEQ ID NO: 2201 - RNA, 20 nt, synthetic construct
  source 1..20: mol_type = other RNA
caccaggcattgtggtctcc

SEQ ID NO: 2202 - RNA, 20 nt, synthetic construct
  source 1..20: mol_type = other RNA
tctgtgcccctacttcccag

SEQ ID NO: 2203 - RNA, 22 nt, synthetic construct
  source 1..22: mol_type = other RNA
ccctgctgccttcacctgccag

SEQ ID NO: 2204 - RNA, 22 nt, synthetic construct
  source 1..22: mol_type = other RNA
ccaatattggctgtgctgctcc

SEQ ID NO: 2205 - RNA, 22 nt, synthetic construct
  source 1..22: mol_type = other RNA
tttagagacggggtcttgctct

SEQ ID NO: 2206 - RNA, 23 nt, synthetic construct
  source 1..23: mol_type = other RNA
tgcacatggcaacctagctccca

SEQ ID NO: 2207 - RNA, 23 nt, synthetic construct
  source 1..23: mol_type = other RNA
gcgcttcgacgggctgggctgtg

SEQ ID NO: 2208 - RNA, 21 nt, synthetic construct
  source 1..21: mol_type = other RNA
tctgaggcctgcctctcccca

SEQ ID NO: 2209 - RNA, 23 nt, synthetic construct
  source 1..23: mol_type = other RNA
tgcaaaagtaattgcagtttttg

SEQ ID NO: 2210 - RNA, 22 nt, synthetic construct
  source 1..22: mol_type = other RNA
aaggcccgggctttcctcccag

SEQ ID NO: 2211 - RNA, 28 nt, synthetic construct
  source 1..28: mol_type = other RNA
tagatctttgactctggcagtctccagg

SEQ ID NO: 2212 - RNA, 21 nt, synthetic construct
  source 1..21: mol_type = other RNA
ttaggccgcagatctgggtga

SEQ ID NO: 2213 - RNA, 22 nt, synthetic construct
  source 1..22: mol_type = other RNA
cgtggatattccttctatgttt

SEQ ID NO: 2214 - RNA, 22 nt, synthetic construct
  source 1..22: mol_type = other RNA
tactaactgcagattcaagtga

SEQ ID NO: 2215 - RNA, 21 nt, synthetic construct
  source 1..21: mol_type = other RNA
gtaggtgacagtcaggggcgg

SEQ ID NO: 2216 - RNA, 22 nt, synthetic construct
  source 1..22: mol_type = other RNA
tattcaggaaggtgttacttaa

SEQ ID NO: 2217 - RNA, 23 nt, synthetic construct
  source 1..23: mol_type = other RNA
gagggtcttgggagggatgtgac

SEQ ID NO: 2218 - RNA, 22 nt, synthetic construct
  source 1..22: mol_type = other RNA
ttcactggagtttgtttcaata

SEQ ID NO: 2219 - RNA, 22 nt, synthetic construct
  source 1..22: mol_type = other RNA
cagcaccctgtggctcccacag

SEQ ID NO: 2220 - RNA, 22 nt, synthetic construct
  source 1..22: mol_type = other RNA
tggtttaccgtcccacatacat

SEQ ID NO: 2221 - RNA, 22 nt, synthetic construct
  source 1..22: mol_type = other RNA
tagcaaaaactgcagttacttt

SEQ ID NO: 2222 - RNA, 22 nt, synthetic construct
  source 1..22: mol_type = other RNA
ctgggggtggggggctgggcgt

SEQ ID NO: 2223 - RNA, 21 nt, synthetic construct
  source 1..21: mol_type = other RNA
tggcaaacgtggaagccgaga

SEQ ID NO: 2224 - RNA, 21 nt, synthetic construct
  source 1..21: mol_type = other RNA
ctgggagaagagtggtgaaga

SEQ ID NO: 2225 - RNA, 21 nt, synthetic construct
  source 1..21: mol_type = other RNA
cccggagccaggatgcagctc

SEQ ID NO: 2226 - RNA, 24 nt, synthetic construct
  source 1..24: mol_type = other RNA
tctgtagcctgggagcaatggggt

SEQ ID NO: 2227 - RNA, 22 nt, synthetic construct
  source 1..22: mol_type = other RNA
tccgagcctgggtctccctctt

SEQ ID NO: 2228 - RNA, 21 nt, synthetic construct
  source 1..21: mol_type = other RNA
ttgctctgagctccgagaaag

SEQ ID NO: 2229 - RNA, 22 nt, synthetic construct
  source 1..22: mol_type = other RNA
atatacagggggagactctcat

SEQ ID NO: 2230 - RNA, 22 nt, synthetic construct
  source 1..22: mol_type = other RNA
gaaaacgacaatgacttttgca

SEQ ID NO: 2231 - RNA, 19 nt, synthetic construct
  source 1..19: mol_type = other RNA
tctgggtgcagtgggggtt

SEQ ID NO: 2232 - RNA, 22 nt, synthetic construct
  source 1..22: mol_type = other RNA
ctacaaagggaagcactttctc

SEQ ID NO: 2233 - RNA, 22 nt, synthetic construct
  source 1..22: mol_type = other RNA
tttcctaccctacctgaagact

SEQ ID NO: 2234 - RNA, 18 nt, synthetic construct
  source 1..18: mol_type = other RNA
ttcccagccaacgcacca

SEQ ID NO: 2235 - RNA, 22 nt, synthetic construct
  source 1..22: mol_type = other RNA
gcgggggtggcggcggcatccc

SEQ ID NO: 2236 - RNA, 22 nt, synthetic construct
  source 1..22: mol_type = other RNA
caaagtgcctccctttagagtg

SEQ ID NO: 2237 - RNA, 23 nt, synthetic construct
  source 1..23: mol_type = other RNA
ttgctagttgcactcctctctgt

SEQ ID NO: 2238 - RNA, 22 nt, synthetic construct
  source 1..22: mol_type = other RNA
ttccatgcctcctagaagttcc

SEQ ID NO: 2239 - RNA, 22 nt, synthetic construct
  source 1..22: mol_type = other RNA
acagattcgattctaggggaat

SEQ ID NO: 2240 - RNA, 22 nt, synthetic construct
  source 1..22: mol_type = other RNA
accctatcaatattgtctctgc

SEQ ID NO: 2241 - RNA, 22 nt, synthetic construct
  source 1..22: mol_type = other RNA
caaaaccgcgattactcttgca

SEQ ID NO: 2242 - RNA, 21 nt, synthetic construct
  source 1..21: mol_type = other RNA
cggcggcggcggctctgggcg

SEQ ID NO: 2243 - RNA, 22 nt, synthetic construct
  source 1..22: mol_type = other RNA
ttagcttaaggagtaccagatc

SEQ ID NO: 2244 - RNA, 17 nt, synthetic construct
  source 1..17: mol_type = other RNA
tggtagagctgaggaca

SEQ ID NO: 2245 - RNA, 22 nt, synthetic construct
  source 1..22: mol_type = other RNA
ttcagatcccagcggtgcctct

SEQ ID NO: 2246 - RNA, 22 nt, synthetic construct
  source 1..22: mol_type = other RNA
tattgcacttgtcccggcctgt

SEQ ID NO: 2247 - RNA, 22 nt, synthetic construct
  source 1..22: mol_type = other RNA
ctcctatatgatgcctttcttc

SEQ ID NO: 2248 - RNA, 21 nt, synthetic construct
  source 1..21: mol_type = other RNA
ccctggggttctgaggacatg

SEQ ID NO: 2249 - RNA, 24 nt, synthetic construct
  source 1..24: mol_type = other RNA
aggcaggggctggtgctgggcggg

SEQ ID NO: 2250 - RNA, 17 nt, synthetic construct
  source 1..17: mol_type = other RNA
taattgcttccatgttt

SEQ ID NO: 2251 - RNA, 22 nt, synthetic construct
  source 1..22: mol_type = other RNA
aaaagtaattgcggattttgcc

SEQ ID NO: 2252 - RNA, 22 nt, synthetic construct
  source 1..22: mol_type = other RNA
tacccattgcatatcggagttg

SEQ ID NO: 2253 - RNA, 24 nt, synthetic construct
  source 1..24: mol_type = other RNA
ggaggccggggtggggcggggcgg

SEQ ID NO: 2254 - RNA, 21 nt, synthetic construct
  source 1..21: mol_type = other RNA
ctccagagggaagtactttct

SEQ ID NO: 2255 - RNA, 22 nt, synthetic construct
  source 1..22: mol_type = other RNA
tggaaggaggttgccggacgct

SEQ ID NO: 2256 - RNA, 18 nt, synthetic construct
  source 1..18: mol_type = other RNA
gaaaaagtcatggaggcc

SEQ ID NO: 2257 - RNA, 23 nt, synthetic construct
  source 1..23: mol_type = other RNA
tgagaactgacaaatgtggtagg

SEQ ID NO: 2258 - RNA, 18 nt, synthetic construct
  source 1..18: mol_type = other RNA
ccaggctctgcagtggga

SEQ ID NO: 2259 - RNA, 21 nt, synthetic construct
  source 1..21: mol_type = other RNA
ctagactgaagctccttgagg

SEQ ID NO: 2260 - RNA, 22 nt, synthetic construct
  source 1..22: mol_type = other RNA
ttacacacaactgaggatcata

SEQ ID NO: 2261 - RNA, 22 nt, synthetic construct
  source 1..22: mol_type = other RNA
atgtagggatggaagccatgaa

SEQ ID NO: 2262 - RNA, 22 nt, synthetic construct
  source 1..22: mol_type = other RNA
cgtcttacccagcagtgtttgg

SEQ ID NO: 2263 - RNA, 18 nt, synthetic construct
  source 1..18: mol_type = other RNA
cagggtcagctgagcatg

SEQ ID NO: 2264 - RNA, 21 nt, synthetic construct
  source 1..21: mol_type = other RNA
cctgttctccattacttggct

SEQ ID NO: 2265 - RNA, 21 nt, synthetic construct
  source 1..21: mol_type = other RNA
ctccgtttgcctgtttcgctg

SEQ ID NO: 2266 - RNA, 22 nt, synthetic construct
  source 1..22: mol_type = other RNA
ggctgagtggggttctgactcc

SEQ ID NO: 2267 - RNA, 22 nt, synthetic construct
  source 1..22: mol_type = other RNA
ctctagagggaagcgctttctg

SEQ ID NO: 2268 - RNA, 21 nt, synthetic construct
  source 1..21: mol_type = other RNA
acaggcacgactggtttggca

SEQ ID NO: 2269 - RNA, 22 nt, synthetic construct
  source 1..22: mol_type = other RNA
taaagtggcagagtatagacac

SEQ ID NO: 2270 - RNA, 20 nt, synthetic construct
  source 1..20: mol_type = other RNA
ctcactctcagtccctccct

SEQ ID NO: 2271 - RNA, 17 nt, synthetic construct
  source 1..17: mol_type = other RNA
gacattcagactacctg

SEQ ID NO: 2272 - RNA, 22 nt, synthetic construct
  source 1..22: mol_type = other RNA
taactggttgaacaactgaacc

SEQ ID NO: 2273 - RNA, 21 nt, synthetic construct
  source 1..21: mol_type = other RNA
acaggagtgggggtgggacat

SEQ ID NO: 2274 - RNA, 22 nt, synthetic construct
  source 1..22: mol_type = other RNA
ccgcactgtgggtacttgctgc

SEQ ID NO: 2275 - RNA, 21 nt, synthetic construct
  source 1..21: mol_type = other RNA
tgcgtttctcctcttgagcag

SEQ ID NO: 2276 - RNA, 21 nt, synthetic construct
  source 1..21: mol_type = other RNA
caattctcaaaggagcctccc

SEQ ID NO: 2277 - RNA, 22 nt, synthetic construct
  source 1..22: mol_type = other RNA
tggaaaaaactggtgtgtgctt

SEQ ID NO: 2278 - RNA, 22 nt, synthetic construct
  source 1..22: mol_type = other RNA
tacggtgagcctgtcattattc

SEQ ID NO: 2279 - RNA, 22 nt, synthetic construct
  source 1..22: mol_type = other RNA
cttctgatcaagatttgtggtg

SEQ ID NO: 2280 - RNA, 22 nt, synthetic construct
  source 1..22: mol_type = other RNA
ctggactgagccatgctactgg

SEQ ID NO: 2281 - RNA, 22 nt, synthetic construct
  source 1..22: mol_type = other RNA
tcttctctgttttggccatgtg

SEQ ID NO: 2282 - RNA, 19 nt, synthetic construct
  source 1..19: mol_type = other RNA
ccctgagaccctaacctta

SEQ ID NO: 2283 - RNA, 22 nt, synthetic construct
  source 1..22: mol_type = other RNA
aagcccttaccccaaaaagcat

SEQ ID NO: 2284 - RNA, 21 nt, synthetic construct
  source 1..21: mol_type = other RNA
attgttctgtctttctcccag

SEQ ID NO: 2285 - RNA, 23 nt, synthetic construct
  source 1..23: mol_type = other RNA
tgtgtacacacgtgccaggcgct

SEQ ID NO: 2286 - RNA, 17 nt, synthetic construct
  source 1..17: mol_type = other RNA
ggggctgggcgcgcgcc

SEQ ID NO: 2287 - RNA, 22 nt, synthetic construct
  source 1..22: mol_type = other RNA
taggagggaatagtaaaagcag

SEQ ID NO: 2288 - RNA, 22 nt, synthetic construct
  source 1..22: mol_type = other RNA
catctggcatccgtcacacaga

SEQ ID NO: 2289 - RNA, 23 nt, synthetic construct
  source 1..23: mol_type = other RNA
cagggagaaggtggaagtgcaga

SEQ ID NO: 2290 - RNA, 22 nt, synthetic construct
  source 1..22: mol_type = other RNA
ttctgcctctgtccaggtcctt

SEQ ID NO: 2291 - RNA, 24 nt, synthetic construct
  source 1..24: mol_type = other RNA
agatattttgagtgtttggaattg

SEQ ID NO: 2292 - RNA, 22 nt, synthetic construct
  source 1..22: mol_type = other RNA
caagcctctcctgcccttccag

SEQ ID NO: 2293 - RNA, 22 nt, synthetic construct
  source 1..22: mol_type = other RNA
aagcgaccatgatgtaacttca

SEQ ID NO: 2294 - RNA, 22 nt, synthetic construct
  source 1..22: mol_type = other RNA
tgaggtagtaagttgtattgtt

SEQ ID NO: 2295 - RNA, 22 nt, synthetic construct
  source 1..22: mol_type = other RNA
tgggagccatgagggtctgtgc

SEQ ID NO: 2296 - RNA, 22 nt, synthetic construct
  source 1..22: mol_type = other RNA
tagcaccatctgaaatcggtta

SEQ ID NO: 2297 - RNA, 24 nt, synthetic construct
  source 1..24: mol_type = other RNA
aatccttggaacctaggtgtgagt

SEQ ID NO: 2298 - RNA, 23 nt, synthetic construct
  source 1..23: mol_type = other RNA
cctccctgcccgcctctctgcag

SEQ ID NO: 2299 - RNA, 21 nt, synthetic construct
  source 1..21: mol_type = other RNA
tgcaggaccaagatgagccct

SEQ ID NO: 2300 - RNA, 22 nt, synthetic construct
  source 1..22: mol_type = other RNA
agctcatccatagttgtcactg

SEQ ID NO: 2301 - RNA, 22 nt, synthetic construct
  source 1..22: mol_type = other RNA
cgtcaacacttgctggtttcct

SEQ ID NO: 2302 - RNA, 23 nt, synthetic construct
  source 1..23: mol_type = other RNA
tatggggcttctgtagagatttc

SEQ ID NO: 2303 - RNA, 22 nt, synthetic construct
  source 1..22: mol_type = other RNA
tagcagcacataatggtttgtg

SEQ ID NO: 2304 - RNA, 22 nt, synthetic construct
  source 1..22: mol_type = other RNA
ttggtgaggaccccaagctcgg

SEQ ID NO: 2305 - RNA, 22 nt, synthetic construct
  source 1..22: mol_type = other RNA
aaaagtaattgcgggttttgcc

SEQ ID NO: 2306 - RNA, 22 nt, synthetic construct
  source 1..22: mol_type = other RNA
ggttccctctccaaatgtgtct

SEQ ID NO: 2307 - RNA, 24 nt, synthetic construct
  source 1..24: mol_type = other RNA
gacctggacatgtttgtgcccagt

SEQ ID NO: 2308 - RNA, 20 nt, synthetic construct
  source 1..20: mol_type = other RNA
agtgcctgagggagtaagag

SEQ ID NO: 2309 - RNA, 20 nt, synthetic construct
  source 1..20: mol_type = other RNA
aggcatgggaggtcaggtga

SEQ ID NO: 2310 - RNA, 23 nt, synthetic construct
  source 1..23: mol_type = other RNA
acggggagtcaggcagtggtgga

SEQ ID NO: 2311 - RNA, 20 nt, synthetic construct
  source 1..20: mol_type = other RNA
gtgtgtggaaatgcttctgc

SEQ ID NO: 2312 - RNA, 22 nt, synthetic construct
  source 1..22: mol_type = other RNA
actttaacatggaggcacttgc

SEQ ID NO: 2313 - RNA, 21 nt, synthetic construct
  source 1..21: mol_type = other RNA
tgactatgatgtgcacctgat

SEQ ID NO: 2314 - RNA, 23 nt, synthetic construct
  source 1..23: mol_type = other RNA
tcttggagtaggtcattgggtgg

SEQ ID NO: 2315 - RNA, 21 nt, synthetic construct
  source 1..21: mol_type = other RNA
gctgggaaggcaaagggacgt

SEQ ID NO: 2316 - RNA, 23 nt, synthetic construct
  source 1..23: mol_type = other RNA
tgagcaccacacaggccgggcgc

SEQ ID NO: 2317 - RNA, 23 nt, synthetic construct
  source 1..23: mol_type = other RNA
aggaaatgaggctggctaggagc

SEQ ID NO: 2318 - RNA, 22 nt, synthetic construct
  source 1..22: mol_type = other RNA
tctgccccctccgctgctgcca

SEQ ID NO: 2319 - RNA, 22 nt, synthetic construct
  source 1..22: mol_type = other RNA
aggccatcagcagtccaatgaa

SEQ ID NO: 2320 - RNA, 23 nt, synthetic construct
  source 1..23: mol_type = other RNA
ttgcatgtcagattgtaattccc

SEQ ID NO: 2321 - RNA, 21 nt, synthetic construct
  source 1..21: mol_type = other RNA
cccgcaggtgagatgagggct

SEQ ID NO: 2322 - RNA, 18 nt, synthetic construct
  source 1..18: mol_type = other RNA
ctggagtctaggattcca

SEQ ID NO: 2323 - RNA, 24 nt, synthetic construct
  source 1..24: mol_type = other RNA
tgaggggcctcagaccgagctttt

SEQ ID NO: 2324 - RNA, 20 nt, synthetic construct
  source 1..20: mol_type = other RNA
atatgcctggctagctcctc

SEQ ID NO: 2325 - RNA, 19 nt, synthetic construct
  source 1..19: mol_type = other RNA
tgccctcctttcttccctc

SEQ ID NO: 2326 - RNA, 22 nt, synthetic construct
  source 1..22: mol_type = other RNA
gccctgaacgaggggtctggag

SEQ ID NO: 2327 - RNA, 19 nt, synthetic construct
  source 1..19: mol_type = other RNA
actggcctgggactaccgg

SEQ ID NO: 2328 - RNA, 21 nt, synthetic construct
  source 1..21: mol_type = other RNA
tctctggtcttgccaccccag

SEQ ID NO: 2329 - RNA, 20 nt, synthetic construct
  source 1..20: mol_type = other RNA
tgtgaggttgtcatgcctgc

SEQ ID NO: 2330 - RNA, 21 nt, synthetic construct
  source 1..21: mol_type = other RNA
atccttgctatctgggtgcta

SEQ ID NO: 2331 - RNA, 22 nt, synthetic construct
  source 1..22: mol_type = other RNA
tttccggctcgcgtgggtgtgt

SEQ ID NO: 2332 - RNA, 21 nt, synthetic construct
  source 1..21: mol_type = other RNA
aaggtttggatagatgcaata

SEQ ID NO: 2333 - RNA, 21 nt, synthetic construct
  source 1..21: mol_type = other RNA
actgaatcctcttttcctcag

SEQ ID NO: 2334 - RNA, 21 nt, synthetic construct
  source 1..21: mol_type = other RNA
tgtgcagcaggccaaccgaga

SEQ ID NO: 2335 - RNA, 23 nt, synthetic construct
  source 1..23: mol_type = other RNA
tattcatttatccccagcctaca

SEQ ID NO: 2336 - RNA, 22 nt, synthetic construct
  source 1..22: mol_type = other RNA
aaaagttattgcggttttggct

SEQ ID NO: 2337 - RNA, 20 nt, synthetic construct
  source 1..20: mol_type = other RNA
agaccatgggttctcattgt

SEQ ID NO: 2338 - RNA, 22 nt, synthetic construct
  source 1..22: mol_type = other RNA
ggtgcagtgctgcatctctggt

SEQ ID NO: 2339 - RNA, 22 nt, synthetic construct
  source 1..22: mol_type = other RNA
caaggccaaaggaagagaacag

SEQ ID NO: 2340 - RNA, 22 nt, synthetic construct
  source 1..22: mol_type = other RNA
agatcagaaggtgattgtggct

SEQ ID NO: 2341 - RNA, 25 nt, synthetic construct
  source 1..25: mol_type = other RNA
aggggggcactgcgcaagcaaagcc

SEQ ID NO: 2342 - RNA, 23 nt, synthetic construct
  source 1..23: mol_type = other RNA
tagcagcgggaacagttctgcag

SEQ ID NO: 2343 - RNA, 21 nt, synthetic construct
  source 1..21: mol_type = other RNA
tgagggacccaggacaggaga

SEQ ID NO: 2344 - RNA, 22 nt, synthetic construct
  source 1..22: mol_type = other RNA
tcggcctgaccacccaccccac

SEQ ID NO: 2345 - RNA, 22 nt, synthetic construct
  source 1..22: mol_type = other RNA
agttttgcatagttgcactaca

SEQ ID NO: 2346 - RNA, 21 nt, synthetic construct
  source 1..21: mol_type = other RNA
ctgggaggggctgggtttggc

SEQ ID NO: 2347 - RNA, 20 nt, synthetic construct
  source 1..20: mol_type = other RNA
tgagccctgtcctcccgcag

SEQ ID NO: 2348 - RNA, 23 nt, synthetic construct
  source 1..23: mol_type = other RNA
tggtgggtggggaggagaagtgc

SEQ ID NO: 2349 - RNA, 22 nt, synthetic construct
  source 1..22: mol_type = other RNA
agctggtaaaatggaaccaaat

SEQ ID NO: 2350 - RNA, 19 nt, synthetic construct
  source 1..19: mol_type = other RNA
ggggcctggcggtgggcgg

SEQ ID NO: 2351 - RNA, 23 nt, synthetic construct
  source 1..23: mol_type = other RNA
ccagagcagcctgcggtaacagt

SEQ ID NO: 2352 - RNA, 19 nt, synthetic construct
  source 1..19: mol_type = other RNA
atcccaccactgccaccat

SEQ ID NO: 2353 - RNA, 21 nt, synthetic construct
  source 1..21: mol_type = other RNA
tcgtgcatatatctaccacat

SEQ ID NO: 2354 - RNA, 22 nt, synthetic construct
  source 1..22: mol_type = other RNA
aggggctggctttcctctggtc

SEQ ID NO: 2355 - RNA, 21 nt, synthetic construct
  source 1..21: mol_type = other RNA
attggactgctgatggcccgt

SEQ ID NO: 2356 - RNA, 22 nt, synthetic construct
  source 1..22: mol_type = other RNA
aactggatcaattataggagtg

SEQ ID NO: 2357 - RNA, 22 nt, synthetic construct
  source 1..22: mol_type = other RNA
accagcgcgttttcagtttcat

SEQ ID NO: 2358 - RNA, 22 nt, synthetic construct
  source 1..22: mol_type = other RNA
gcagcagggtgaaactgacaca

SEQ ID NO: 2359 - RNA, 21 nt, synthetic construct
  source 1..21: mol_type = other RNA
ccagtgactgagctggagcca

SEQ ID NO: 2360 - RNA, 21 nt, synthetic construct
  source 1..21: mol_type = other RNA
aatgagagacctgtactgtat

SEQ ID NO: 2361 - RNA, 22 nt, synthetic construct
  source 1..22: mol_type = other RNA
agggggtagaaagtggctgaag

SEQ ID NO: 2362 - RNA, 21 nt, synthetic construct
  source 1..21: mol_type = other RNA
gaactcaccctctgctcccag

SEQ ID NO: 2363 - RNA, 21 nt, synthetic construct
  source 1..21: mol_type = other RNA
tgcctccctgacattccacag

SEQ ID NO: 2364 - RNA, 17 nt, synthetic construct
  source 1..17: mol_type = other RNA
ggagtgggctggtggtt

SEQ ID NO: 2365 - RNA, 22 nt, synthetic construct
  source 1..22: mol_type = other RNA
aactcgtgttcaaagcctttag

SEQ ID NO: 2366 - RNA, 25 nt, synthetic construct
  source 1..25: mol_type = other RNA
agaattctcttatccaacatcaaca

SEQ ID NO: 2367 - RNA, 22 nt, synthetic construct
  source 1..22: mol_type = other RNA
aggcagtgtattgttagctggc

SEQ ID NO: 2368 - RNA, 22 nt, synthetic construct
  source 1..22: mol_type = other RNA
tctgacatcagtgattctcctg

SEQ ID NO: 2369 - RNA, 22 nt, synthetic construct
  source 1..22: mol_type = other RNA
aggggactggttaatagaacta

SEQ ID NO: 2370 - RNA, 17 nt, synthetic construct
  source 1..17: mol_type = other RNA
cactgtgggtacatgct

SEQ ID NO: 2371 - RNA, 18 nt, synthetic construct
  source 1..18: mol_type = other RNA
caccatggacggtttacc

SEQ ID NO: 2372 - RNA, 22 nt, synthetic construct
  source 1..22: mol_type = other RNA
atgggtgaatttgtagaaggat

SEQ ID NO: 2373 - RNA, 22 nt, synthetic construct
  source 1..22: mol_type = other RNA
atattattagccacttctggat

SEQ ID NO: 2374 - RNA, 22 nt, synthetic construct
  source 1..22: mol_type = other RNA
atataatacaacctgctaagtg

SEQ ID NO: 2375 - RNA, 22 nt, synthetic construct
  source 1..22: mol_type = other RNA
tgaccgatttctcctggtgttc

SEQ ID NO: 2376 - RNA, 22 nt, synthetic construct
  source 1..22: mol_type = other RNA
ctgggagagggttgtttactcc

SEQ ID NO: 2377 - RNA, 23 nt, synthetic construct
  source 1..23: mol_type = other RNA
aaaagtaactgcggtttttgcct

SEQ ID NO: 2378 - RNA, 22 nt, synthetic construct
  source 1..22: mol_type = other RNA
agtcattggagggtttgagcag

SEQ ID NO: 2379 - RNA, 25 nt, synthetic construct
  source 1..25: mol_type = other RNA
tagaggttctaatggtccagggtta

SEQ ID NO: 2380 - RNA, 22 nt, synthetic construct
  source 1..22: mol_type = other RNA
atcaaggatcttaaactttgcc

SEQ ID NO: 2381 - RNA, 22 nt, synthetic construct
  source 1..22: mol_type = other RNA
agattgtttcttttgccgtgca

SEQ ID NO: 2382 - RNA, 22 nt, synthetic construct
  source 1..22: mol_type = other RNA
tgaagccagctctggtctgggc

SEQ ID NO: 2383 - RNA, 22 nt, synthetic construct
  source 1..22: mol_type = other RNA
tgggttcctggcatgctgattt

SEQ ID NO: 2384 - RNA, 23 nt, synthetic construct
  source 1..23: mol_type = other RNA
cagtaacaaagattcatccttgt

SEQ ID NO: 2385 - RNA, 22 nt, synthetic construct
  source 1..22: mol_type = other RNA
tccctgagaccctaacttgtga

SEQ ID NO: 2386 - RNA, 21 nt, synthetic construct
  source 1..21: mol_type = other RNA
aagcctgcccggctcctcggg

SEQ ID NO: 2387 - RNA, 24 nt, synthetic construct
  source 1..24: mol_type = other RNA
catagcccggtcgctggtacatga

SEQ ID NO: 2388 - RNA, 21 nt, synthetic construct
  source 1..21: mol_type = other RNA
tgagggtgtcagcaggtgacg

SEQ ID NO: 2389 - RNA, 22 nt, synthetic construct
  source 1..22: mol_type = other RNA
tcagtaaatgtttattagatga

SEQ ID NO: 2390 - RNA, 22 nt, synthetic construct
  source 1..22: mol_type = other RNA
cagaacaggagcatagaaaggc

SEQ ID NO: 2391 - RNA, 22 nt, synthetic construct
  source 1..22: mol_type = other RNA
actcaaaagatggcggcacttt

SEQ ID NO: 2392 - RNA, 18 nt, synthetic construct
  source 1..18: mol_type = other RNA
agagcagaaggatgagat

SEQ ID NO: 2393 - RNA, 25 nt, synthetic construct
  source 1..25: mol_type = other RNA
cctccaaagggaagcgctttctgtt

SEQ ID NO: 2394 - RNA, 22 nt, synthetic construct
  source 1..22: mol_type = other RNA
tctctgagcaaggcttaacacc

SEQ ID NO: 2395 - RNA, 23 nt, synthetic construct
  source 1..23: mol_type = other RNA
taagtgcttccatgtttcagtgg

SEQ ID NO: 2396 - RNA, 22 nt, synthetic construct
  source 1..22: mol_type = other RNA
atctggaggtaagaagcacttt

SEQ ID NO: 2397 - RNA, 21 nt, synthetic construct
  source 1..21: mol_type = other RNA
tccggttctcagggctccacc

SEQ ID NO: 2398 - RNA, 19 nt, synthetic construct
  source 1..19: mol_type = other RNA
atggataaggctttggctt

SEQ ID NO: 2399 - RNA, 22 nt, synthetic construct
  source 1..22: mol_type = other RNA
tcagcaaacatttattgtgtgc

SEQ ID NO: 2400 - RNA, 22 nt, synthetic construct
  source 1..22: mol_type = other RNA
tggacggagaactgataagggt

SEQ ID NO: 2401 - RNA, 27 nt, synthetic construct
  source 1..27: mol_type = other RNA
tggtctgttcattctctctttttggcc

SEQ ID NO: 2402 - RNA, 22 nt, synthetic construct
  source 1..22: mol_type = other RNA
actgctgagctagcacttcccg

SEQ ID NO: 2403 - RNA, 20 nt, synthetic construct
  source 1..20: mol_type = other RNA
ctacaggctggaatgggctc

SEQ ID NO: 2404 - RNA, 23 nt, synthetic construct
  source 1..23: mol_type = other RNA
gggggccgatacactgtacgaga

SEQ ID NO: 2405 - RNA, 23 nt, synthetic construct
  source 1..23: mol_type = other RNA
tatggcttttcattcctatgtga

SEQ ID NO: 2406 - RNA, 21 nt, synthetic construct
  source 1..21: mol_type = other RNA
tagcagcacagaaatattggc

SEQ ID NO: 2407 - RNA, 21 nt, synthetic construct
  source 1..21: mol_type = other RNA
gtctgaccaacctcctcccgc

SEQ ID NO: 2408 - RNA, 21 nt, synthetic construct
  source 1..21: mol_type = other RNA
caaaaactgcattacttttgc

SEQ ID NO: 2409 - RNA, 22 nt, synthetic construct
  source 1..22: mol_type = other RNA
aaaggaaagtgtatcctaaaag

SEQ ID NO: 2410 - RNA, 22 nt, synthetic construct
  source 1..22: mol_type = other RNA
acaggtgaggttcttgggagcc

SEQ ID NO: 2411 - RNA, 23 nt, synthetic construct
  source 1..23: mol_type = other RNA
gggggggcaggaggggctcaggg

SEQ ID NO: 2412 - RNA, 21 nt, synthetic construct
  source 1..21: mol_type = other RNA
gtggctctgtagtaagatgga

SEQ ID NO: 2413 - RNA, 23 nt, synthetic construct
  source 1..23: mol_type = other RNA
ccagggggatgggcgagcttggg

SEQ ID NO: 2414 - RNA, 22 nt, synthetic construct
  source 1..22: mol_type = other RNA
ctgtacagcctcctagctttcc

SEQ ID NO: 2415 - RNA, 17 nt, synthetic construct
  source 1..17: mol_type = other RNA
ccccgccaccgccttgg

SEQ ID NO: 2416 - RNA, 23 nt, synthetic construct
  source 1..23: mol_type = other RNA
aaaatggtgccctagtgactaca

SEQ ID NO: 2417 - RNA, 21 nt, synthetic construct
  source 1..21: mol_type = other RNA
aagcctctgtccccaccccag

SEQ ID NO: 2418 - RNA, 22 nt, synthetic construct
  source 1..22: mol_type = other RNA
aaagtgcttctctttggtgggt

SEQ ID NO: 2419 - RNA, 17 nt, synthetic construct
  source 1..17: mol_type = other RNA
ggtgggggctgttgttt

SEQ ID NO: 2420 - RNA, 22 nt, synthetic construct
  source 1..22: mol_type = other RNA
ggggggtgtggagccagggggc

SEQ ID NO: 2421 - RNA, 22 nt, synthetic construct
  source 1..22: mol_type = other RNA
ttttgcaatatgttcctgaata

SEQ ID NO: 2422 - RNA, 17 nt, synthetic construct
  source 1..17: mol_type = other RNA
gcttctgtagtgtagtc

SEQ ID NO: 2423 - RNA, 22 nt, synthetic construct
  source 1..22: mol_type = other RNA
gacactaggcatgtgagtgatt

SEQ ID NO: 2424 - RNA, 24 nt, synthetic construct
  source 1..24: mol_type = other RNA
aggaggatggagagctgggccaga

SEQ ID NO: 2425 - RNA, 19 nt, synthetic construct
  source 1..19: mol_type = other RNA
gggggaagaaaaggtgggg

SEQ ID NO: 2426 - RNA, 24 nt, synthetic construct
  source 1..24: mol_type = other RNA
aggggtgtggaaagaggcagaaca

SEQ ID NO: 2427 - RNA, 23 nt, synthetic construct
  source 1..23: mol_type = other RNA
tggagatccagtgctcgcccgat

SEQ ID NO: 2428 - RNA, 22 nt, synthetic construct
  source 1..22: mol_type = other RNA
tgaatggtaaagcgatgtcaca

SEQ ID NO: 2429 - RNA, 21 nt, synthetic construct
  source 1..21: mol_type = other RNA
ttggggtggtcggccctggag

SEQ ID NO: 2430 - RNA, 19 nt, synthetic construct
  source 1..19: mol_type = other RNA
gaatacgtctggttgatcc

SEQ ID NO: 2431 - RNA, 23 nt, synthetic construct
  source 1..23: mol_type = other RNA
ccagccacggactgagagtgcat

SEQ ID NO: 2432 - RNA, 21 nt, synthetic construct
  source 1..21: mol_type = other RNA
gtgggcgggggcaggtgtgtg

SEQ ID NO: 2433 - RNA, 19 nt, synthetic construct
  source 1..19: mol_type = other RNA
gactggacaagctgaggaa

SEQ ID NO: 2434 - RNA, 21 nt, synthetic construct
  source 1..21: mol_type = other RNA
tgacccacccctctccaccag

SEQ ID NO: 2435 - RNA, 22 nt, synthetic construct
  source 1..22: mol_type = other RNA
tatgtgggatggtaaaccgctt

SEQ ID NO: 2436 - RNA, 23 nt, synthetic construct
  source 1..23: mol_type = other RNA
tgtgcttgctcgtcccgcccgca

SEQ ID NO: 2437 - RNA, 23 nt, synthetic construct
  source 1..23: mol_type = other RNA
gcctggagctactccaccatctc

SEQ ID NO: 2438 - RNA, 21 nt, synthetic construct
  source 1..21: mol_type = other RNA
cttcttgtgctctaggattgt

SEQ ID NO: 2439 - RNA, 22 nt, synthetic construct
  source 1..22: mol_type = other RNA
caacctcgaggatctccccagc

SEQ ID NO: 2440 - RNA, 21 nt, synthetic construct
  source 1..21: mol_type = other RNA
gtgagggactgggatttgtgg

SEQ ID NO: 2441 - RNA, 23 nt, synthetic construct
  source 1..23: mol_type = other RNA
tagtgagttagagatgcagagcc

SEQ ID NO: 2442 - RNA, 22 nt, synthetic construct
  source 1..22: mol_type = other RNA
tgggaaagagaaagaacaagta

SEQ ID NO: 2443 - RNA, 21 nt, synthetic construct
  source 1..21: mol_type = other RNA
tgttcatgtagatgtttaagc

SEQ ID NO: 2444 - RNA, 22 nt, synthetic construct
  source 1..22: mol_type = other RNA
tgtctactactggagacactgg

SEQ ID NO: 2445 - RNA, 22 nt, synthetic construct
  source 1..22: mol_type = other RNA
caaaaactgcagttacttttgt

SEQ ID NO: 2446 - RNA, 21 nt, synthetic construct
  source 1..21: mol_type = other RNA
tcagggttggtaggggttgct

SEQ ID NO: 2447 - RNA, 22 nt, synthetic construct
  source 1..22: mol_type = other RNA
tacgcgcagaccacaggatgtc

SEQ ID NO: 2448 - RNA, 22 nt, synthetic construct
  source 1..22: mol_type = other RNA
cagcagcaattcatgttttgaa

SEQ ID NO: 2449 - RNA, 22 nt, synthetic construct
  source 1..22: mol_type = other RNA
tgtaacagcaactccatgtgga

SEQ ID NO: 2450 - RNA, 22 nt, synthetic construct
  source 1..22: mol_type = other RNA
actggcagaacactgaagcagc

SEQ ID NO: 2451 - RNA, 21 nt, synthetic construct
  source 1..21: mol_type = other RNA
tagaccatctttctagagtat

SEQ ID NO: 2452 - RNA, 22 nt, synthetic construct
  source 1..22: mol_type = other RNA
accttcctctccatgggtcttt

SEQ ID NO: 2453 - RNA, 19 nt, synthetic construct
  source 1..19: mol_type = other RNA
gatgatgctgctgatgctg

SEQ ID NO: 2454 - RNA, 22 nt, synthetic construct
  source 1..22: mol_type = other RNA
ttggctggtctctgctccgcag

SEQ ID NO: 2455 - RNA, 21 nt, synthetic construct
  source 1..21: mol_type = other RNA
tgccaaccgtcagagcccaga

SEQ ID NO: 2456 - RNA, 23 nt, synthetic construct
  source 1..23: mol_type = other RNA
tctgtattctcctttgcctgcag

SEQ ID NO: 2457 - RNA, 21 nt, synthetic construct
  source 1..21: mol_type = other RNA
aatgtaaacaggctttttgct

SEQ ID NO: 2458 - RNA, 22 nt, synthetic construct
  source 1..22: mol_type = other RNA
tgatatgtttgatattgggttg

SEQ ID NO: 2459 - RNA, 22 nt, synthetic construct
  source 1..22: mol_type = other RNA
aaaagtaactatggtttttgcc

SEQ ID NO: 2460 - RNA, 26 nt, synthetic construct
  source 1..26: mol_type = other RNA
gctcagggatgataactgtgctgaga

SEQ ID NO: 2461 - RNA, 24 nt, synthetic construct
  source 1..24: mol_type = other RNA
caaagtgatgagtaatactggctg

SEQ ID NO: 2462 - RNA, 20 nt, synthetic construct
  source 1..20: mol_type = other RNA
agggtgtttctctcatctct

SEQ ID NO: 2463 - RNA, 23 nt, synthetic construct
  source 1..23: mol_type = other RNA
ttcgggctggcctgctgctccgg

SEQ ID NO: 2464 - RNA, 20 nt, synthetic construct
  source 1..20: mol_type = other RNA
gtgcaaaagtcatcacggtt

SEQ ID NO: 2465 - RNA, 21 nt, synthetic construct
  source 1..21: mol_type = other RNA
tgggggtgtggggagagagag

SEQ ID NO: 2466 - RNA, 22 nt, synthetic construct
  source 1..22: mol_type = other RNA
caaaactggcaattacttttgc

SEQ ID NO: 2467 - RNA, 18 nt, synthetic construct
  source 1..18: mol_type = other RNA
atcctagtcacggcacca

SEQ ID NO: 2468 - RNA, 18 nt, synthetic construct
  source 1..18: mol_type = other RNA
gtgaaggcccggcggaga

SEQ ID NO: 2469 - RNA, 22 nt, synthetic construct
  source 1..22: mol_type = other RNA
tgtcgtggggcttgctggcttg

SEQ ID NO: 2470 - RNA, 23 nt, synthetic construct
  source 1..23: mol_type = other RNA
aggatgagcaaagaaagtagatt

SEQ ID NO: 2471 - RNA, 21 nt, synthetic construct
  source 1..21: mol_type = other RNA
actggacttggtgtcagatgg

SEQ ID NO: 2472 - RNA, 19 nt, synthetic construct
  source 1..19: mol_type = other RNA
tgccctgagacttttgctc

SEQ ID NO: 2473 - RNA, 22 nt, synthetic construct
  source 1..22: mol_type = other RNA
cctctagggaagagaaggttgg

SEQ ID NO: 2474 - RNA, 22 nt, synthetic construct
  source 1..22: mol_type = other RNA
agcaaaataagcaaatggaaaa

SEQ ID NO: 2475 - RNA, 22 nt, synthetic construct
  source 1..22: mol_type = other RNA
tcacaaatctataatatgcagg

SEQ ID NO: 2476 - RNA, 21 nt, synthetic construct
  source 1..21: mol_type = other RNA
atctgccagcttccacagtgg

SEQ ID NO: 2477 - RNA, 20 nt, synthetic construct
  source 1..20: mol_type = other RNA
atggagatagatatagaaat

SEQ ID NO: 2478 - RNA, 22 nt, synthetic construct
  source 1..22: mol_type = other RNA
tagcaagagaaccattaccatt

SEQ ID NO: 2479 - RNA, 20 nt, synthetic construct
  source 1..20: mol_type = other RNA
accctttttctctttcccag

SEQ ID NO: 2480 - RNA, 23 nt, synthetic construct
  source 1..23: mol_type = other RNA
tgcagctctggtggaaaatggag

SEQ ID NO: 2481 - RNA, 22 nt, synthetic construct
  source 1..22: mol_type = other RNA
gctgggattacaggcatgagcc

SEQ ID NO: 2482 - RNA, 20 nt, synthetic construct
  source 1..20: mol_type = other RNA
aagtcctgcttctgttgcag

SEQ ID NO: 2483 - RNA, 19 nt, synthetic construct
  source 1..19: mol_type = other RNA
tgagggagtgggtgggagg

SEQ ID NO: 2484 - RNA, 22 nt, synthetic construct
  source 1..22: mol_type = other RNA
tgtgtcactcgatgaccactgt

SEQ ID NO: 2485 - RNA, 22 nt, synthetic construct
  source 1..22: mol_type = other RNA
tgtcttactccctcaggcacat

SEQ ID NO: 2486 - RNA, 22 nt, synthetic construct
  source 1..22: mol_type = other RNA
atatacctgttcggtctcttta

SEQ ID NO: 2487 - RNA, 22 nt, synthetic construct
  source 1..22: mol_type = other RNA
tgaggtaggaggttgtatagtt

SEQ ID NO: 2488 - RNA, 22 nt, synthetic construct
  source 1..22: mol_type = other RNA
tccccttctgcaggcctgctgg

SEQ ID NO: 2489 - RNA, 22 nt, synthetic construct
  source 1..22: mol_type = other RNA
tgagggagtaggatgtatggtt

SEQ ID NO: 2490 - RNA, 21 nt, synthetic construct
  source 1..21: mol_type = other RNA
agagatgccgccttgctcctt

SEQ ID NO: 2491 - RNA, 20 nt, synthetic construct
  source 1..20: mol_type = other RNA
tcccactacttcacttgtga

SEQ ID NO: 2492 - RNA, 17 nt, synthetic construct
  source 1..17: mol_type = other RNA
gtggggccaggcggtgg

SEQ ID NO: 2493 - RNA, 21 nt, synthetic construct
  source 1..21: mol_type = other RNA
cctcggtactggaaaggggta

SEQ ID NO: 2494 - RNA, 24 nt, synthetic construct
  source 1..24: mol_type = other RNA
tctgggcacaggcggatggacagg

SEQ ID NO: 2495 - RNA, 22 nt, synthetic construct
  source 1..22: mol_type = other RNA
ctatacaatctattgccttccc

SEQ ID NO: 2496 - RNA, 21 nt, synthetic construct
  source 1..21: mol_type = other RNA
caaagaggaaggtcccattac

SEQ ID NO: 2497 - RNA, 20 nt, synthetic construct
  source 1..20: mol_type = other RNA
cggctctgggtctgtgggga

SEQ ID NO: 2498 - RNA, 22 nt, synthetic construct
  source 1..22: mol_type = other RNA
tcaaaatcaggagtcggggctt

SEQ ID NO: 2499 - RNA, 22 nt, synthetic construct
  source 1..22: mol_type = other RNA
ctgtacaaccttctagctttcc

SEQ ID NO: 2500 - RNA, 23 nt, synthetic construct
  source 1..23: mol_type = other RNA
gcgaggacccctcggggtctgac

SEQ ID NO: 2501 - RNA, 23 nt, synthetic construct
  source 1..23: mol_type = other RNA
ttgaactgttaagaaccactgga

SEQ ID NO: 2502 - RNA, 23 nt, synthetic construct
  source 1..23: mol_type = other RNA
aactgaaccaggagtgagcttcg

SEQ ID NO: 2503 - RNA, 22 nt, synthetic construct
  source 1..22: mol_type = other RNA
gagtggggcttcgaccctaacc

SEQ ID NO: 2504 - RNA, 23 nt, synthetic construct
  source 1..23: mol_type = other RNA
tagcaatacagtacaaatatagt

SEQ ID NO: 2505 - RNA, 26 nt, synthetic construct
  source 1..26: mol_type = other RNA
cacaggactgactcctcaccccagtg

SEQ ID NO: 2506 - RNA, 19 nt, synthetic construct
  source 1..19: mol_type = other RNA
tctcccttgagggcacttt

SEQ ID NO: 2507 - RNA, 21 nt, synthetic construct
  source 1..21: mol_type = other RNA
atggtctcctgttctctgcag

SEQ ID NO: 2508 - RNA, 23 nt, synthetic construct
  source 1..23: mol_type = other RNA
gaggctgatgtgagtagaccact

SEQ ID NO: 2509 - RNA, 21 nt, synthetic construct
  source 1..21: mol_type = other RNA
agacctggcccagacctcagc

SEQ ID NO: 2510 - RNA, 21 nt, synthetic construct
  source 1..21: mol_type = other RNA
cagcggagcctggagagaagg

SEQ ID NO: 2511 - RNA, 23 nt, synthetic construct
  source 1..23: mol_type = other RNA
tctctgagtaccatatgccttgt

SEQ ID NO: 2512 - RNA, 22 nt, synthetic construct
  source 1..22: mol_type = other RNA
tctgtgcttcacccctacccag

SEQ ID NO: 2513 - RNA, 22 nt, synthetic construct
  source 1..22: mol_type = other RNA
acgggttaggctcttgggagct

SEQ ID NO: 2514 - RNA, 22 nt, synthetic construct
  source 1..22: mol_type = other RNA
tctggtatgtagtaggtaataa

SEQ ID NO: 2515 - RNA, 22 nt, synthetic construct
  source 1..22: mol_type = other RNA
atggccagagctcacacagagg

SEQ ID NO: 2516 - RNA, 21 nt, synthetic construct
  source 1..21: mol_type = other RNA
ctaccccccatccccctgtag

SEQ ID NO: 2517 - RNA, 16 nt, synthetic construct
  source 1..16: mol_type = other RNA
ctaggaggccttggcc

SEQ ID NO: 2518 - RNA, 22 nt, synthetic construct
  source 1..22: mol_type = other RNA
tctgccatcctccctcccctac

SEQ ID NO: 2519 - RNA, 21 nt, synthetic construct
  source 1..21: mol_type = other RNA
ccagtcctgtgcctgccgcct

SEQ ID NO: 2520 - RNA, 22 nt, synthetic construct
  source 1..22: mol_type = other RNA
aaaagtaattgtggattttgct

SEQ ID NO: 2521 - RNA, 22 nt, synthetic construct
  source 1..22: mol_type = other RNA
accatcgaccgttgattgtacc

SEQ ID NO: 2522 - RNA, 24 nt, synthetic construct
  source 1..24: mol_type = other RNA
actggctagggaaaatgattggat

SEQ ID NO: 2523 - RNA, 22 nt, synthetic construct
  source 1..22: mol_type = other RNA
tattactgtgagaattatgatg

SEQ ID NO: 2524 - RNA, 16 nt, synthetic construct
  source 1..16: mol_type = other RNA
ctctcctcccggcttc

SEQ ID NO: 2525 - RNA, 23 nt, synthetic construct
  source 1..23: mol_type = other RNA
atacacatacacgcaacacacat

SEQ ID NO: 2526 - RNA, 22 nt, synthetic construct
  source 1..22: mol_type = other RNA
cgggcgccgcgctcccgcccgc

SEQ ID NO: 2527 - RNA, 23 nt, synthetic construct
  source 1..23: mol_type = other RNA
agaattgcgtttggacaatcagt

SEQ ID NO: 2528 - RNA, 22 nt, synthetic construct
  source 1..22: mol_type = other RNA
tgttgggattcagcaggaccat

SEQ ID NO: 2529 - RNA, 22 nt, synthetic construct
  source 1..22: mol_type = other RNA
ccaatattactgtgctgcttta

SEQ ID NO: 2530 - RNA, 22 nt, synthetic construct
  source 1..22: mol_type = other RNA
gtgggtacggcccagtgggggg

SEQ ID NO: 2531 - RNA, 22 nt, synthetic construct
  source 1..22: mol_type = other RNA
atgaagccttctctgccttacg

SEQ ID NO: 2532 - RNA, 17 nt, synthetic construct
  source 1..17: mol_type = other RNA
ttgtctgctgagtttcc

SEQ ID NO: 2533 - RNA, 23 nt, synthetic construct
  source 1..23: mol_type = other RNA
aacattcaacgctgtcggtgagt

SEQ ID NO: 2534 - RNA, 22 nt, synthetic construct
  source 1..22: mol_type = other RNA
aaagatagacaattggctaaat

SEQ ID NO: 2535 - RNA, 21 nt, synthetic construct
  source 1..21: mol_type = other RNA
atagcaattgctcttttggaa

SEQ ID NO: 2536 - RNA, 22 nt, synthetic construct
  source 1..22: mol_type = other RNA
tcagatgatctaaaggcctata

SEQ ID NO: 2537 - RNA, 21 nt, synthetic construct
  source 1..21: mol_type = other RNA
ctcctcccctgcctggcccag

SEQ ID NO: 2538 - RNA, 22 nt, synthetic construct
  source 1..22: mol_type = other RNA
actccaagaagaatctagacag

SEQ ID NO: 2539 - RNA, 18 nt, synthetic construct
  source 1..18: mol_type = other RNA
tgaggcagtagattgaat

SEQ ID NO: 2540 - RNA, 22 nt, synthetic construct
  source 1..22: mol_type = other RNA
ttctggaattctgtgtgaggga

SEQ ID NO: 2541 - RNA, 22 nt, synthetic construct
  source 1..22: mol_type = other RNA
cacttagcaggttgtattatat

SEQ ID NO: 2542 - RNA, 20 nt, synthetic construct
  source 1..20: mol_type = other RNA
atgggtgatgggtgtggtgt

SEQ ID NO: 2543 - RNA, 19 nt, synthetic construct
  source 1..19: mol_type = other RNA
tctgaggtggaacagcagc

SEQ ID NO: 2544 - RNA, 19 nt, synthetic construct
  source 1..19: mol_type = other RNA
ggctggtcagatgggagtg

SEQ ID NO: 2545 - RNA, 21 nt, synthetic construct
  source 1..21: mol_type = other RNA
cctctcctccctgtgccccag

SEQ ID NO: 2546 - RNA, 22 nt, synthetic construct
  source 1..22: mol_type = other RNA
aaaagctgggttgagagggcaa

SEQ ID NO: 2547 - RNA, 22 nt, synthetic construct
  source 1..22: mol_type = other RNA
gggagccaggaagtattgatgt

SEQ ID NO: 2548 - RNA, 22 nt, synthetic construct
  source 1..22: mol_type = other RNA
tcatttatctgttgggaagcta

SEQ ID NO: 2549 - RNA, 21 nt, synthetic construct
  source 1..21: mol_type = other RNA
cgggccggaggtcaagggcgt

SEQ ID NO: 2550 - RNA, 25 nt, synthetic construct
  source 1..25: mol_type = other RNA
aggtgccattctgagggccaggagt

SEQ ID NO: 2551 - RNA, 20 nt, synthetic construct
  source 1..20: mol_type = other RNA
cagggaaccagttggggctt

SEQ ID NO: 2552 - RNA, 22 nt, synthetic construct
  source 1..22: mol_type = other RNA
aactctgtcttcactcatgagt

SEQ ID NO: 2553 - RNA, 21 nt, synthetic construct
  source 1..21: mol_type = other RNA
ctgacctatgaattgacagcc

SEQ ID NO: 2554 - RNA, 22 nt, synthetic construct
  source 1..22: mol_type = other RNA
aaaagtatttgcgggttttgtc

SEQ ID NO: 2555 - RNA, 22 nt, synthetic construct
  source 1..22: mol_type = other RNA
cccagaaatctggtatgccagc

SEQ ID NO: 2556 - RNA, 23 nt, synthetic construct
  source 1..23: mol_type = other RNA
tgtctttcttctctcccttgcag

SEQ ID NO: 2557 - RNA, 22 nt, synthetic construct
  source 1..22: mol_type = other RNA
tctacaaaggaaagcgctttct

SEQ ID NO: 2558 - RNA, 21 nt, synthetic construct
  source 1..21: mol_type = other RNA
tcatccccctcgccctctcag

SEQ ID NO: 2559 - RNA, 21 nt, synthetic construct
  source 1..21: mol_type = other RNA
tttccctttccatcctggcag

SEQ ID NO: 2560 - RNA, 22 nt, synthetic construct
  source 1..22: mol_type = other RNA
agcatacacctgtagtcctaga

SEQ ID NO: 2561 - RNA, 23 nt, synthetic construct
  source 1..23: mol_type = other RNA
acttcacctggtccactagccgt

SEQ ID NO: 2562 - RNA, 22 nt, synthetic construct
  source 1..22: mol_type = other RNA
cagtgcaatgatgaaagggcat

SEQ ID NO: 2563 - RNA, 22 nt, synthetic construct
  source 1..22: mol_type = other RNA
tgaggtagtaggttgtatggtt

SEQ ID NO: 2564 - RNA, 23 nt, synthetic construct
  source 1..23: mol_type = other RNA
caaaaaccgcaattacttttgca

SEQ ID NO: 2565 - RNA, 22 nt, synthetic construct
  source 1..22: mol_type = other RNA
gtgaaatgtttaggaccactag

SEQ ID NO: 2566 - RNA, 22 nt, synthetic construct
  source 1..22: mol_type = other RNA
atcacacaaaggcaacttttgt

SEQ ID NO: 2567 - RNA, 22 nt, synthetic construct
  source 1..22: mol_type = other RNA
ttcctgggcttctcctctgtag

SEQ ID NO: 2568 - RNA, 23 nt, synthetic construct
  source 1..23: mol_type = other RNA
aaagcacctccagagcttgaagc

SEQ ID NO: 2569 - RNA, 17 nt, synthetic construct
  source 1..17: mol_type = other RNA
tccctgagcaaagccac

SEQ ID NO: 2570 - RNA, 22 nt, synthetic construct
  source 1..22: mol_type = other RNA
tagggtactcagagcaagttgt

SEQ ID NO: 2571 - RNA, 22 nt, synthetic construct
  source 1..22: mol_type = other RNA
ataatacaacctgctaagtgct

SEQ ID NO: 2572 - RNA, 22 nt, synthetic construct
  source 1..22: mol_type = other RNA
acagtagtctgcacattggtta

SEQ ID NO: 2573 - RNA, 19 nt, synthetic construct
  source 1..19: mol_type = other RNA
cagcaggaggtgaggggag

SEQ ID NO: 2574 - RNA, 23 nt, synthetic construct
  source 1..23: mol_type = other RNA
tagtgcaatattgcttatagggt

SEQ ID NO: 2575 - RNA, 26 nt, synthetic construct
  source 1..26: mol_type = other RNA
taaggaacgcggggccttggtagagc

SEQ ID NO: 2576 - RNA, 20 nt, synthetic construct
  source 1..20: mol_type = other RNA
tcactctcaccttgctttgc

SEQ ID NO: 2577 - RNA, 22 nt, synthetic construct
  source 1..22: mol_type = other RNA
tagtactgtgcatatcatctat

SEQ ID NO: 2578 - RNA, 22 nt, synthetic construct
  source 1..22: mol_type = other RNA
tcctgtctttccttgttggagc

SEQ ID NO: 2579 - RNA, 23 nt, synthetic construct
  source 1..23: mol_type = other RNA
taggtggcagaggagggacttca

SEQ ID NO: 2580 - RNA, 22 nt, synthetic construct
  source 1..22: mol_type = other RNA
cagccgccgcctgtctccacag

SEQ ID NO: 2581 - RNA, 22 nt, synthetic construct
  source 1..22: mol_type = other RNA
cgcgcctgcaggaactggtaga

SEQ ID NO: 2582 - RNA, 23 nt, synthetic construct
  source 1..23: mol_type = other RNA
cggccccacgcaccagggtaaga

SEQ ID NO: 2583 - RNA, 21 nt, synthetic construct
  source 1..21: mol_type = other RNA
tgacttctacctcttccaaag

SEQ ID NO: 2584 - RNA, 23 nt, synthetic construct
  source 1..23: mol_type = other RNA
gagtggataggggagtgtgtgga

SEQ ID NO: 2585 - RNA, 22 nt, synthetic construct
  source 1..22: mol_type = other RNA
ctagtgctctccgttacaagta

SEQ ID NO: 2586 - RNA, 19 nt, synthetic construct
  source 1..19: mol_type = other RNA
accgtgcaaaggtagcata

SEQ ID NO: 2587 - RNA, 21 nt, synthetic construct
  source 1..21: mol_type = other RNA
gcggtggggccggaggggcgt

SEQ ID NO: 2588 - RNA, 22 nt, synthetic construct
  source 1..22: mol_type = other RNA
aaactaatctctacactgctgc

SEQ ID NO: 2589 - RNA, 22 nt, synthetic construct
  source 1..22: mol_type = other RNA
gactgacacctctttgggtgaa

SEQ ID NO: 2590 - RNA, 23 nt, synthetic construct
  source 1..23: mol_type = other RNA
ttagaggctggaatagagattct

SEQ ID NO: 2591 - RNA, 20 nt, synthetic construct
  source 1..20: mol_type = other RNA
aaggagatgctcaggcagat

SEQ ID NO: 2592 - RNA, 23 nt, synthetic construct
  source 1..23: mol_type = other RNA
agcagcattgtacagggctatca

SEQ ID NO: 2593 - RNA, 23 nt, synthetic construct
  source 1..23: mol_type = other RNA
tcacaacaaccttgcagggtaga

SEQ ID NO: 2594 - RNA, 21 nt, synthetic construct
  source 1..21: mol_type = other RNA
ttggacggtaaggttaagcaa

SEQ ID NO: 2595 - RNA, 22 nt, synthetic construct
  source 1..22: mol_type = other RNA
tatacaagggcagactctctct

SEQ ID NO: 2596 - RNA, 21 nt, synthetic construct
  source 1..21: mol_type = other RNA
gaagaataggagggactttgt

SEQ ID NO: 2597 - RNA, 20 nt, synthetic construct
  source 1..20: mol_type = other RNA
tccgtacaaactctgctgtg

SEQ ID NO: 2598 - RNA, 23 nt, synthetic construct
  source 1..23: mol_type = other RNA
ttctctctgtctttctctctcag

SEQ ID NO: 2599 - RNA, 22 nt, synthetic construct
  source 1..22: mol_type = other RNA
ccaccaggtctagcattgggat

SEQ ID NO: 2600 - RNA, 22 nt, synthetic construct
  source 1..22: mol_type = other RNA
ttaattttttgtttcggtcact

SEQ ID NO: 2601 - RNA, 21 nt, synthetic construct
  source 1..21: mol_type = other RNA
ctcccacttccagatctttct

SEQ ID NO: 2602 - RNA, 21 nt, synthetic construct
  source 1..21: mol_type = other RNA
ttagtgcatagtctttggtct

SEQ ID NO: 2603 - RNA, 23 nt, synthetic construct
  source 1..23: mol_type = other RNA
gtgagtgtggatcctggaggaat

SEQ ID NO: 2604 - RNA, 22 nt, synthetic construct
  source 1..22: mol_type = other RNA
tgtgcgcagggagacctctccc

SEQ ID NO: 2605 - RNA, 21 nt, synthetic construct
  source 1..21: mol_type = other RNA
aagggacagggagggtcgtgg

SEQ ID NO: 2606 - RNA, 23 nt, synthetic construct
  source 1..23: mol_type = other RNA
caaagcgcttctctttagagtgt

SEQ ID NO: 2607 - RNA, 21 nt, synthetic construct
  source 1..21: mol_type = other RNA
catacaatctgacatgtattt

SEQ ID NO: 2608 - RNA, 21 nt, synthetic construct
  source 1..21: mol_type = other RNA
cagcccggatcccagcccact

SEQ ID NO: 2609 - RNA, 22 nt, synthetic construct
  source 1..22: mol_type = other RNA
catggttctgtcaagcaccgcg

SEQ ID NO: 2610 - RNA, 23 nt, synthetic construct
  source 1..23: mol_type = other RNA
taaatttcacctttctgagaaga

SEQ ID NO: 2611 - RNA, 20 nt, synthetic construct
  source 1..20: mol_type = other RNA
acctgggttgtcccctctag

SEQ ID NO: 2612 - RNA, 22 nt, synthetic construct
  source 1..22: mol_type = other RNA
ctctagagggaagcgctttctg

SEQ ID NO: 2613 - RNA, 23 nt, synthetic construct
  source 1..23: mol_type = other RNA
accttggctctagactgcttact

SEQ ID NO: 2614 - RNA, 21 nt, synthetic construct
  source 1..21: mol_type = other RNA
ttaatatcggacaaccattgt

SEQ ID NO: 2615 - RNA, 23 nt, synthetic construct
  source 1..23: mol_type = other RNA
ctgtaatataaatttaatttatt

SEQ ID NO: 2616 - RNA, 21 nt, synthetic construct
  source 1..21: mol_type = other RNA
gaagctctcccctccccgcag

SEQ ID NO: 2617 - RNA, 23 nt, synthetic construct
  source 1..23: mol_type = other RNA
taaccctgtcctctccctcccag

SEQ ID NO: 2618 - RNA, 22 nt, synthetic construct
  source 1..22: mol_type = other RNA
caggccatattgtgctgcctca

SEQ ID NO: 2619 - RNA, 23 nt, synthetic construct
  source 1..23: mol_type = other RNA
gtgagtgtggatttggcggggtt

SEQ ID NO: 2620 - RNA, 23 nt, synthetic construct
  source 1..23: mol_type = other RNA
tagccttcagatcttggtgtttt

SEQ ID NO: 2621 - RNA, 23 nt, synthetic construct
  source 1..23: mol_type = other RNA
tgagtgtgtgtgtgtgagtgtgt

SEQ ID NO: 2622 - RNA, 22 nt, synthetic construct
  source 1..22: mol_type = other RNA
caatgtttccacagtgcatcac

SEQ ID NO: 2623 - RNA, 21 nt, synthetic construct
  source 1..21: mol_type = other RNA
tgagtgccggtgcctgccctg

SEQ ID NO: 2624 - RNA, 22 nt, synthetic construct
  source 1..22: mol_type = other RNA
aaaactgtaattacttttgtac

SEQ ID NO: 2625 - RNA, 26 nt, synthetic construct
  source 1..26: mol_type = other RNA
gtgagggcatgcaggcctggatgggg

SEQ ID NO: 2626 - RNA, 22 nt, synthetic construct
  source 1..22: mol_type = other RNA
cacatatgaagtgagccagcac

SEQ ID NO: 2627 - RNA, 23 nt, synthetic construct
  source 1..23: mol_type = other RNA
aatgtggaagtggtctgaggcat

SEQ ID NO: 2628 - RNA, 20 nt, synthetic construct
  source 1..20: mol_type = other RNA
gaatcggaaaggaggcgccg

SEQ ID NO: 2629 - RNA, 23 nt, synthetic construct
  source 1..23: mol_type = other RNA
cgcgggcgctcctggccgccgcc

SEQ ID NO: 2630 - RNA, 22 nt, synthetic construct
  source 1..22: mol_type = other RNA
gagggttgggtggaggctctcc

SEQ ID NO: 2631 - RNA, 22 nt, synthetic construct
  source 1..22: mol_type = other RNA
agaggttatccgtgttatgttc

SEQ ID NO: 2632 - RNA, 21 nt, synthetic construct
  source 1..21: mol_type = other RNA
tgctgaggtccgggctgtgcc

SEQ ID NO: 2633 - RNA, 23 nt, synthetic construct
  source 1..23: mol_type = other RNA
ttccagccctggtaggcgccgcg

SEQ ID NO: 2634 - RNA, 21 nt, synthetic construct
  source 1..21: mol_type = other RNA
ataggcaccaaaaagcaacaa

SEQ ID NO: 2635 - RNA, 22 nt, synthetic construct
  source 1..22: mol_type = other RNA
ctctagagggaagcgctttctg

SEQ ID NO: 2636 - RNA, 21 nt, synthetic construct
  source 1..21: mol_type = other RNA
tcctcttctccctcctcccag

SEQ ID NO: 2637 - RNA, 21 nt, synthetic construct
  source 1..21: mol_type = other RNA
tccctgcccccatactcccag

SEQ ID NO: 2638 - RNA, 21 nt, synthetic construct
  source 1..21: mol_type = other RNA
cctgtgctcccagggcctcgc

SEQ ID NO: 2639 - RNA, 21 nt, synthetic construct
  source 1..21: mol_type = other RNA
ttcacagtggctaagttctgc

SEQ ID NO: 2640 - RNA, 22 nt, synthetic construct
  source 1..22: mol_type = other RNA
ataagacgaacaaaaggtttgt

SEQ ID NO: 2641 - RNA, 22 nt, synthetic construct
  source 1..22: mol_type = other RNA
gtggttatccctgtcctgttcg

SEQ ID NO: 2642 - RNA, 22 nt, synthetic construct
  source 1..22: mol_type = other RNA
aaacctgtgttgttcaagagtc

SEQ ID NO: 2643 - RNA, 20 nt, synthetic construct
  source 1..20: mol_type = other RNA
cctctgggcccttcctccag

SEQ ID NO: 2644 - RNA, 21 nt, synthetic construct
  source 1..21: mol_type = other RNA
tgggagagaggactgtgaggc

SEQ ID NO: 2645 - RNA, 21 nt, synthetic construct
  source 1..21: mol_type = other RNA
tgcctactgagctgaaacaca

SEQ ID NO: 2646 - RNA, 22 nt, synthetic construct
  source 1..22: mol_type = other RNA
atatacagggggagactcttat

SEQ ID NO: 2647 - RNA, 23 nt, synthetic construct
  source 1..23: mol_type = other RNA
tgcaaaagtaattgcagtttttg

SEQ ID NO: 2648 - RNA, 21 nt, synthetic construct
  source 1..21: mol_type = other RNA
agtggaccgaggaaggaagga

SEQ ID NO: 2649 - RNA, 20 nt, synthetic construct
  source 1..20: mol_type = other RNA
ggaggttgggaagggcagag

SEQ ID NO: 2650 - RNA, 21 nt, synthetic construct
  source 1..21: mol_type = other RNA
tgaccccttctgtctccctag

SEQ ID NO: 2651 - RNA, 22 nt, synthetic construct
  source 1..22: mol_type = other RNA
ccatgtgtctgggctgggaaac

SEQ ID NO: 2652 - RNA, 24 nt, synthetic construct
  source 1..24: mol_type = other RNA
aacaacaaaatcactagtcttcca

SEQ ID NO: 2653 - RNA, 22 nt, synthetic construct
  source 1..22: mol_type = other RNA
aactagctctgtggatcctgac

SEQ ID NO: 2654 - RNA, 22 nt, synthetic construct
  source 1..22: mol_type = other RNA
taaaacccacaattatgtttgt

SEQ ID NO: 2655 - RNA, 24 nt, synthetic construct
  source 1..24: mol_type = other RNA
tctgccataggaagcttggagtgg

SEQ ID NO: 2656 - RNA, 24 nt, synthetic construct
  source 1..24: mol_type = other RNA
aggagctatccactccaggtgtcc

SEQ ID NO: 2657 - RNA, 21 nt, synthetic construct
  source 1..21: mol_type = other RNA
atacccatagcttagctccca

SEQ ID NO: 2658 - RNA, 22 nt, synthetic construct
  source 1..22: mol_type = other RNA
tcttcacctgcctctgcctgca

SEQ ID NO: 2659 - RNA, 22 nt, synthetic construct
  source 1..22: mol_type = other RNA
tagcagcacgtaaatattggcg

SEQ ID NO: 2660 - RNA, 22 nt, synthetic construct
  source 1..22: mol_type = other RNA
taggattacaagtgtcggccac

SEQ ID NO: 2661 - RNA, 21 nt, synthetic construct
  source 1..21: mol_type = other RNA
ttgggacatacttatgctaaa

SEQ ID NO: 2662 - RNA, 23 nt, synthetic construct
  source 1..23: mol_type = other RNA
tactgcatcaggaactgattgga

SEQ ID NO: 2663 - RNA, 19 nt, synthetic construct
  source 1..19: mol_type = other RNA
tgagctgctgtaccaaaat

SEQ ID NO: 2664 - RNA, 21 nt, synthetic construct
  source 1..21: mol_type = other RNA
attgacacctctgtgagtgga

SEQ ID NO: 2665 - RNA, 21 nt, synthetic construct
  source 1..21: mol_type = other RNA
agagtcggcgacgccgccagc

SEQ ID NO: 2666 - RNA, 24 nt, synthetic construct
  source 1..24: mol_type = other RNA
tgggggagccatgagataagagca

SEQ ID NO: 2667 - RNA, 22 nt, synthetic construct
  source 1..22: mol_type = other RNA
atcaaataaggactagtctgca

SEQ ID NO: 2668 - RNA, 24 nt, synthetic construct
  source 1..24: mol_type = other RNA
tgaagcgcctgtgctctgccgaga

SEQ ID NO: 2669 - RNA, 22 nt, synthetic construct
  source 1..22: mol_type = other RNA
gctgatgatgatggtgctgaag

SEQ ID NO: 2670 - RNA, 17 nt, synthetic construct
  source 1..17: mol_type = other RNA
gggagtctacagcaggg

SEQ ID NO: 2671 - RNA, 23 nt, synthetic construct
  source 1..23: mol_type = other RNA
cactcagccttgagggcactttc

SEQ ID NO: 2672 - RNA, 23 nt, synthetic construct
  source 1..23: mol_type = other RNA
caacggaatcccaaaagcagctg

SEQ ID NO: 2673 - RNA, 20 nt, synthetic construct
  source 1..20: mol_type = other RNA
cctcctgccctccttgctgt

SEQ ID NO: 2674 - DNA, 30 bp, synthetic construct
  source 1..30: mol_type = other DNA
tcagactgatgttgatggcaagcatcctgt

SEQ ID NO: 2675 - DNA, 35 bp, synthetic construct
  source 1..35: mol_type = other DNA
tacaggatgcttgtcaacatcagtctgataagcta

What is claimed is:

1. A non-naturally occurring double stranded nucleobase polymer complex comprising
a first strand comprising,
a first domain with a first segment of cell specific RNA and
a second domain that is complementary to a segment of target RNA; and
a second strand comprising,
a first domain that is complementary to the second domain of the first strand,
a second domain that is complementary the first domain of the first strand second, and
a third domain that is complementary to a second segment of the cell specific RNA, wherein the third domain is not complementary to the first strand providing single stranded segment.

2. The double stranded nucleobase polymer complex of claim 1, wherein the first domain of the first strand is on the 5′ end of the first strand.

3. The double stranded nucleobase polymer complex of claim 1, wherein the second domain of the first strand is on the 3′ end of the first strand.

4. The double stranded nucleobase polymer complex of claim 1, wherein the first domain of the second strand is on the 5′ end of the second strand.

5. The double stranded nucleobase polymer complex of claim 1, wherein the second domain of the second strand is on the 3′ end of the first domain of the second strand.

6. The double stranded nucleobase polymer complex of claim 1, wherein the third domain of the second strand is on the 3′-end of the second strand.

7. The double stranded nucleobase polymer complex of claim 1, wherein the cell specific RNA is microRNA.

8. The double stranded nucleobase polymer complex of claim 1, wherein the cell specific RNA is miR-122 or miR-21.

9. The double stranded nucleobase polymer complex of claim 1, wherein the target RNA is messenger RNA.

10. The double stranded nucleobase polymer complex of claim 1, wherein the target RNA is HIF1alpha messenger RNA.

11. The double stranded nucleobase polymer complex of claim 1, wherein between the first domain of the first strand and the second domain of the first strand is one or more nucleobases that do not base pair with the second strand providing a bulge.

12. The double stranded nucleobase polymer complex of claim 11, wherein one or more nucleobases that do not base pair with the second strand are one, two or three nucleobases.

13. The double stranded nucleobase polymer complex of claim 11, wherein the third domain of the second strand is between 12 and 4 nucleobases.

14. The double stranded nucleobase polymer complex of claim 11, wherein the first strand comprises CAATGGTGTTTGTGGCAAGCATCCTGT (SEQ ID NO: 1) (pM12-EZN miR-122), TGACAATGGTGTTTGTGGCAAGCATCCTGT (SEQ ID NO: 2) (pM15-EZN miR-122), or GTGTGACAATGGTGTTTGTGGCAAGCATCCTGT (SEQ ID NO: 3) (pM18-EZN miR-122) wherein each T is optionally U.

15. The double stranded nucleobase polymer complex of claim 11, wherein the second strand comprises
TACAGGATGCTTGCCACAAACACCATTGTCACACTCCA (SEQ ID NO: 13) (B0 miR-122), or
TACAGGATGCTTGCAAACACCATTGTCACACTCCA (SEQ ID NO: 14) (B3 miR-122), wherein each T is optionally U.

16. The double stranded nucleobase polymer complex of claim 11, wherein the first strand comprises TGACAATGGTGTTTGTGGCAAGCATCCTGT (SEQ ID NO: 2) (pM15-EZN miR-122), and the second strand comprises TACAGGATGCTTGCAAACACCATTGTCACACTCCA (SEQ ID NO: 14) (B3 miR-122), wherein each T is optionally U.

17. The double stranded nucleobase polymer complex of claim 16, wherein the first strand is T*G*A*C*A*A*T*G*G*T*G*T*T*T*G*+T*+G*+G*C*A*A*G*C*A*T*C*C*+T*+G*+T* (SEQ ID NO: 2) (pM15-EZN miR-122) and the second strand is *T*A*C*A*G*G*A*T*G*C*+T*+T*+G*+C*+A*+A*A*C*A*C*C*A*T*T*G*T*C*A*C*A*C*T*C*C*A (SEQ ID NO: 14) (B3 miR-122) wherein + is the locked nucleobase and * is a phosphorothioate.

18. The double stranded nucleobase polymer complex of claim 11, wherein the first strand comprises TCAGACTGATGTTGATGGCAAGCATCCTGT (SEQ ID NO: 2674) (pM15-EZN miR-21), and the second strand comprises TACAGGATGCTTGTCAACATCAGTCTGATAAGCTA (SEQ ID NO: 2675) (B3 miR-21), wherein each T is optionally U.

19. The double stranded nucleobase polymer complex of claim 18, wherein the first strand is T*C*A*G*A*C*T*G*A*T*G*T*T*G*A*+T*+G*+G*C*A*A*G*C*A*T*C*C*+T*+G*+T* (SEQ ID NO: 2674) (pM15-EZN miR-21) and the second strand is *T*A*C*A*G*G*A*T*G*C*+T*+T*+G*+T*+C*+A*A*C*A*T*C*A*G*T*C*T*G*A*T*A*A*G*C*T*A (SEQ ID NO: 2675) (B3 miR-21) wherein + is the locked nucleobase and * is a phosphorothioate.

20. A pharmaceutical composition comprising a double stranded nucleobase polymer complex of claim 1 and a pharmaceutically acceptable excipient.

21. A method of treating a disease or condition associated with target RNA overexpression in a cell characterized by cell specific RNA expression comprising administering to a subject in need thereof an effective amount of a double stranded nucleobase polymer complex of claim 1.
